United States Patent Application Publication US 2023/0390346 A1 - sequence listing, part 13

SEQ ID NO: 261 - DNA, 4063573 bp, Bacillus amyloliquefaciens (residues 1-2,031,787 of 4,063,573)
gatacatcgcaatttgtcttgggaaagccactgatttcgtacgctttttcgctttgaaatcttcaagcttaatgttgaactgctgtccgacaatccgctgaatctcttttatcgtaatgaccttcggcttagaagacggaataatatctttcaatgcttctgcagccaggtctgcgttaatgtctttattgattaaggatgaataggcgacaacccggattaatgccccttccagttcgcggatgttgctgtcaatctgattggcgatgtaaagcatgacctcgttcggaatatcaaggccctccgccttcgctttctttctcagaatggcaatccgcgtttccagatccggcggtgtgatgtctgtaatcaatccccattcgaaccgcgaacgcaggcggtcttcaagggtcgggatctctttcggcggtctgtcactggaaatcacgatttgtttgctttcttcatgaagtgtgttgaatgtatggaaaaactcttcctgtgtttgttcttttccggctaaaaattgaatatcatctatcaaaagtacatcaacgttccggtagcggttgcggaaatcaacggctttattatcgcggattgagttgatgaattcatttgtgaatttttcagaagacaggtacaccactttggctgaaggattatgatcaatgacataatggccgatcgcgtgcattaagtgggtttttcctaaaccgactcccccgtatataaataaagggttgtacgctttagcgggtgcttccgccacagccagtgatgctgcatgggcgaatcggtttcccgatccgatgacgaatgtgtcgaatgtatatttcgggttgagcatgctttggggaaaatcagacggttcctcttttgccgcttttttcacttgcggtttcggcaaaaagtcttcttcgtcctgattttgaggaatgacaaatttgacgctcaattcttccccggttaattcatatatggtatctgcaatgagatgtaagtacctggactccagccagtctctggcaaattcattgggagcggtgatggttaaggtatctccttgcagcgaatgggctttcgtcgacttcatccaagtttcgaaactcggtttgcttagctttttctcaatttgagctagagcttgattccaaagatccaatatattctccattatccggcacagccctccttttctttaaaaatcagcgcccttcccctgttatagaacacaaaaaaagagcatatggctctgaccattcgtacacacgaaatgttgaaaacatatagtatagtagaaaaatagcttttcgacaaattccacaagttgtggacaacaatctacacaagctgtgtgaaaacaatccacaacttatccacaatttgtggataaagagaatggactggataagtaattaagagttaaaacacaaatataatatcaaattaagcgaggacttgcaatggttctcgtaatcttatccacaaacctgacaacttgttgaaaaatctttgtccacaggggttagcaatgtgaaaatgttgtcgataacgattgtggatattaaaaaaagaccgaaaaattatccacatgtcgttttttcgggggagcgcggctttttttgtgcgttaaaaaaaggaatatgaaaaataaggtttctaatctggttaaggtatgttatcctattatggttgtaagaaataaaagcactgctgaagttgacaatgaataggcagcacaaatataataagtaagactgtctttaacagctattcctcgagggaggtgtcataaatgaaaagaacattccaaccgaataaccgtaaacgcagtaaagttcatggcttcagaagccgtatgagttcaaaaaacggtcgtctagtattagcacgccgtcgccgcaaaggcagaaaagtattatcagcttaggccactgaataatgtcagtggtcttttttcacattaagagaaaagagatgtcatgcgtcgcccggtactggagaaatttcttcagtattccggcggcccgttttttttagatagaaataaaagtttctgcgagtgaatatcggagtgaattaaagtgaagaagcgaaatcggttaaagaaaaatgaagattttcaaaaagtgtttaaacgcggaacgtctatggcaaaccgccagttcgtgctgtatacgcttgatcagccgaaacaggaagagctccgggtagggctttctgtcagtaaaaaaatcggcaatgccgtcgtgcgcaatcgggtgaagcggttaatcaggcaggcggttcaggaggaaaaagagctgctcaagccgaaagattttattattatcgcaagaaaacccgccggcgacctcagttttgaagaaacgaaaaagagtctgcagcacttattcagaaaaacctcattatataagaaatcttcgtcaaaatagctcatattttgttttcttcacgtttttaaaagcgcttccttttatttggcgaaaaatgaacgccatttgaaactgaaagatgctaaaatacatacaaggtttataaagattggtataggaggaaacgttcttgaaaaggagaatatggttactactgagtatggtcggtatgctcgtgctgctggccgggtgctcgagtgtgaaagagccgattacggcgaatagtccgcatttctgggacaaatatgttgtgtatccattgtcagaagtcattacgtacgtagcgaaactgacgggcgataactatggtttgtcgatcatcatcgttacgattttaattcgtctgctgattctgccgctgatgatcaagcagcttcgaagctcaaaagcgatgcaggcgctgcagcctgaaatgcagaagctcagagaaaaatacagctctaaagatcaaaaaacgcagcagaagcttcagcaggaaacaatggccctgttttcaaagcacggggtaaacccgctggcgggatgtttcccgatcctgattcaaatgccgattttgatcggattctaccacgccattatgcgtacgcaagccatttcacagcacagctttttatggtttgatttaggagagaaggatccttactatattcttcctatcgttgccggtgtggccacttttgtccagcagaagctgatgatggcgggaaatccgactcagaatcctcaaatggcaatgatggtatggattatgccgatcatgatcatcgtatttgcgatcaacttcccgagcgcgctttctctgtattgggtagtcggaaacctgtttatgattgctcagacattccttattaaaggacctgacattaaacacgatccggaaacgcagaaagccggaggaaagaaaaagtgaagaaggtgactgctgcgggacggaatgtcgaagaagcagttcaatcaggccttcaggaacttcaactgacgaaagatcaagtagaaataacggtggtgcaagaagaatataaagggtttttgggtattttcggaaaaaagaatgcgattgtagaactggaagagaaaagaaatcctgttcaggaagcgaaagcgtatttagaagaaatcatccattccattgccgggccttctgagattgttacggaagaaaacaagaaaacagtctgttttcatattaaaggtgaaaaagcggcgctgcttattggcaaaagaggacaaacactcaatgccttggaaacattgacgcagcttgttttgaaccgcggctccggccagtatcgccaagccgttgtcgacgctgaaaattatcggcggaaaagaagagaaattctggatcagctggcaaacaggctggccaagcaagtgtcgaaaacgaaaaaagaggtgcatttagaaccgatgccgtcaggtgaaagaaaaatcatccatgacgcgctgtcaaagcatccaaatatcaaaacgttttctaccggtgaaggccggtaccgccatctcgttatttcccataaagatagcagaaaaccgaagtccgggtaaaatcggaacttcggtttttttattggtaaaaatggctctattcctgagcagaatcgcattttttgcgtttaagttttttctttttaggtctatgctgttgataaaaaaggttttaggaaataaaattaattgttattcacatgtggataagttaaagtaataagggatgaatttctgcctttgtggataacgtatcttccacttcaaaccaaactatgttatcttttaattttggcgtaaataaaattttttatatagatggaaacagagataaagagaggtgaacagtatggatacaattgcagcgatttcaactccgatgggtgaaggcgcgattgcgatcgttcggctgagcggcccggaagccgtaaagatcgccgacaaaatgtacaagggtccgaaaggcaaaacgctcagttcggcagaatcgcataccattcattacgggcatatcgcggacagtacgacgggacggattattgaggaagtcatggtgtctgttttaagagcgcccagaacattcacaagggaagatgtcattgaaatcaactgtcacgggggtattgtgacggttaatcaggtgctccagcttgctttaagagaaggtgcgagactggcagaacccggtgagtttacgaagcgcgcatttttaaacggacggattgacctttcacaggcggaagcggtgatggatctgatcagagccaaaacggaccgtgccatgaatgtcgccatgaaccagatggaaggacggctttccgcgcttgtccgccgtctgcgtgatgagttgttagaaacacttgcccatgttgaggtaaatatagattatccggaatatgatgacgtcgaagaaatgacgcatcagcttttagtggagaaggcaagcggcgtgaagaaagaaatcgaggcgctgctccgtacgtctgagcaggggaaaattttgcgtgagggactgtctaccgtgatcatcggccgtccgaacgtcgggaaatcctctctgcttaacagccttgtccatgaaacgaaggcgatcgtaaccgatattccgggaacgacgcgtgatgtgattgaggaatatgtcaacgtgcgaggcgtgccgcttcggcttgtcgataccgccggaatccgtgagacagaagacatcgtcgaaagaatcggtgtggaacggtcacggcaggttctgaaggaagcggatctcattttgcttgtgcttaaccacagcgaagcgctttctgaagaagatgtgaaattgtttgaagcggttgagggaatggacgtcattgtcattatgaataagacggaccttgaggctaagattgacgctgagcgcgtcaaggaactggcgaaaggccggcctgtcgtcacgacctcattgctgaaagaagaaggcattcaagatttagaggaagcgattcagtcgctattttatacaggagcgatcgaaagcggagatctcacctatgtcagcaacacccgtcatatttcgattctgcatcaggcaaagcaagcgattgatgatgcgctgaacgggattgaacaggatgttccgattgatatggtgcaaattgatttgacaaggtgctgggaactgctgggcgaaatcatcggtgatgccgttcacgaaagcttaattgatcagctcttttcacaattttgtttaggtaaataaaagggaggaaaaaaccatggggtatgaagcaggccaatacgacgtgattgtcatcggcgccgggcatgccggtgttgaggctgccctcgcatccgcgcgccagggagccaaaacgcttgttttgacgattaatcttgatatggttgcgtttatgccatgtaatccgtctgtcggcggccccgcgaaagggattgtcgtccgcgaaattgacgcgctcggcggagaaatggctagaaatatagataaaactcatattcaaatgagaatgctgaatacaggaaaaggtccggccgtacgggcgctgcgtgcgcaggcggataaattccaatatcagcacgaaatgaagcatacgctggaaaaaacaccgaatttgacacttcttcaagggattgccgagcgtttaatcattgaagacggagagtgccgcggtgtcattacgcaaaccggtgctgaatacaaggcaaaaacggtcgtgctgacaaccggaacgtatttaagagggcggatcattctcggggatctgtcttactcaagcggtccgaataaccagcagccgtctattaaactttctgagcacttagaggagctcggttttgatctcgtccgttttaaaacgggcacgcctcctcgtgtctcaagcgattccattgattacagcaaaacagaaatccagccgggggacccggttccgcgcgctttctcatatgaaacggttgaatacattaccgatcagctgccttgctggctgacttacacgagtcctgagactcatgagatcatcgacagcaacctgcatcgttcgccgatgtattccggtatgattaaaggaacgggaccgagatactgcccttcgattgaagataaagtcgttcggtttaatgataaaccgcgccatcagattttccttgagccggaaggcagaaatacgcaggaagtatacgttcagggtctatccacgagtcttcctgaggacgtgcagcagcggatgctggcgaccattccgggactggaaaaggtgcagatgatgagagccggatacgcgattgagtatgacgcgattgtaccgacgcagctctggcctacactggagacgaaaaaaatccctaacctgtacacagccggtcaaattaacggtacatcaggttatgaggaagcagccgggcaaggaattatggcagggatcaacgcaggccgcaaagcgcttggaaaagaagaagtgatcctcagccgttccgatgcttatatcggtgtattgattgatgatttggtaacgaaaggaaccaatgaaccgtatcgtctgctgacttcacgggcggaatacagactgctgctccgtcacgacaacgcggatcttcgcctgacggaaatcggccatgagatcggcttaatttctgatgagcgctatgaagcgtttgagaagaaaaaagcggcgatcgaggcagagaaaaaacgtctctggtctgttattatcaagccgtctcctgagaatcaggaatatatccgttcactcggcggaagcgagctgaaagacggagtgcgcggcacagatttaatgaaacgtccggaaatgaactatgaaacagtgacaaaacttgcgcctgcagattctccggttccgcaagatgtggcggaacaagtggaaattcaggtgaaatatgaaggatatatcgaaaaatccttgcagcaagtggaaaagctgaagaaaatggaaaacaaaaaaatccctgatcggattgattatgacgccattaaaggaattgctactgaagcgcgtcaaaagctgaaagaagtgcgtcctttatcagttgctcaagcgtcccgtatttccggcgtcaatccggcagacatttcaatcctgctggtatacctggagcagggccgtattgccaaggtagctgaatagaaaggatgacggcatgaatatagagcaatttacatccagtttagcggagaaagggatttccctttctgaccgccagctggagcaattcgagttgtattaccggatgctcgtggaatggaacgaaaaaatgaatctgacatccatcactgagaaaaaggaagtttatctcaagcatttttatgattcgataacggcggcattttatattgattttgaaaaggtcaccactctttgtgacgtcggcgccggcgccggttttccaagcctgcccgtcaaaatctgcttcccgcatctgcatgtcaccatcgtcgattcactgaataagcggattacgtttttggaaactctctctgatgctttacaattagagcatacgacatttgtccatgacagagcggagacattcggacagcggaaagacgtccgggaaagcttcgatctcgtgacggcccgtgcggtggcgcgtctgtcggtcctgagtgagctttgtctgccgctggccaagaaaaacggtatttttgcggcattaaaagctgcagccgctgatgaagagctgaaagcggggcaaaaggcgattaaagtattgggaggagagcttgaacaagttcattcctttacacttcccgttgaagaaagtgaacggaacattatgatcattcgcaagacgaaaagcactccgaaaaaatatccgagaaaaccgggtactccaaataaatcgccaattgaagggtaatttagacagcctgatgtgacaattccatcatattttctgcaaaattgatgaagatacagcaggaaaaaccatgagaaaatagaattataaaaatggcagtttttaaaggtggtgtaggtacatgaagcattcattctctcgtttcttcgggtttggtgagaaggaagaggaaccggagatagctgagcatgatacaaacaaagaagagatactcgaaataccggtacatgctatcgttcccaaccgttttcagccacgcaccattttctcagatgaaaaaatcaaagagttagcaatgactatccatacacacggcatcattcagccgattgttgtcagacatacagaagatgaaggacaatatgagctcattgcgggtgaaaggcgctggagagcggtacagacgcttgaatgggagaagattcccgcaattattaaagatttttctgatacggaaacagcatctgtcgctttgattgaaaacctgcaaagggaagaattgtcctccattgaggaagctcatgcgtacgcaaggctgttagaacttcatgatttaacacaggaagccttggcgcagcgcttaggaaaaggccagtcaacgattgcgaacaagctccgattgttaaagctcccggaacccgtccaggatgcgattatggagaaaaaaattacggaacgtcatgcaagagcactgattccgctcaaacagccggagtttcaggtcacattgcttgcggaaatcattgagaaaagcttaaacgtcaagcagacagaagacagagtggtgaaaatgcttgaacagaataagcagaaaccaaagccgagacgcaaagcgttcagcagggatacaagaattgcgatgaatacgattcgtcagtcactgtccatggtggaagacagcggcgtcaggctgaacactgaagaagaagaattcgaagagtacatccagcttaccattcggatacctaaataaaaactctcctgatcagcaggggagtttttattttaatcaaaaaactattttgagataatgatagatttattgtgcactatacattatatatgtaaaattttatctttttgtgtcgtgaattgtctttttacagtcaaaaaagtcactttatcggagaacttatattagaaagtgtctttttcgtttacatttttttcacttgctgataaacaaattatgaaaaaaataaaacgctttactctttttttgataagatagaaacaagacagtacatgttcatgtgaaggtaggtgacatcgtgggaaaaatcatagcaattacgaaccaaaaaggcggagtcgggaagacgacgacttctgtcaatctgggggcttgcttggcttacataggtaaaagggttcttcttgttgatattgatccgcagggcaatgcaacgagcggattagggattgaaaaagccgatgtggatcattgtgtgtacgacattttagtagatgatgcagatgttacagatattattaaaccgacttcagtagagaacttagatgtcattccggccacgatccagcttgcgggagcggaaatcgaattggttccgacgatctcacgggaggtcaggctgaaaagagcattagaatctgtgaaacaaaattacgattacatgattattgattgtcctccgtctctcgggttattaacgattaatgcgcttaccgcttcagattcagtcgttatcccggttcagtgcgaatactacgctcttgaaggattgagtcaattattaaatacagttcggcttgtgcaaaaacatttaaataccgacttaatgatagaaggagtgcttctgacgatgcttgatgccagaacgaatctcggcattcaagtgatagaagaggtaaagaaatactttagagataaagtgtatcaaaccattattcctcgcaatgtccgtttaagtgaggcgccgagtcacggcaagccgatcatattatacgatccgcgttcgagaggtgcggaagtatatttagatttagcaaaggaagtggcagcgaatggctaaaggcgggctcggaaaagggattaacgcgttgtttaatcaggttgatttgtctgaagagacagtggaagaaattaaaatcagtgatttacgccccaatccttatcagccaagaaaacaatttgatgatgagtcattagctgaactgaaggaatccatcattcagcatggcattcttcagcccattatcgtgagaaaatcattgaagggctatgatattgtagccggcgaacgccgttaccgcgccgcaaaacttgccggtaaagagacagtgccggctatcgtgcgggatttatctgaatcgctgatgcgggaaatcgctcttttggaaaaccttcagcgtgaagacttatcaccgcttgaagaagctctggcatatgactcactgctgaagcatttggatttaacccaggaacagctcgctaaacggctcgggaaaagcaggcctcatattgccaaccatttaagactgctgacgctgccggaaagcatccagaacctcattgcagaaggtacgttatccatgggacacggcagaaccttgcttggcttgaaaaataaaaacaagcttgaaccgcttgtgaagaaagtggttgaagaacagctgaacgtccgccagcttgagcagctgattcagcagttaaacaacaatgttccacgtgaaacaaagaaaaaagaacctgttcaagatgttgtgttaaaagagcgggaatcgtatttgcaaaattacttcggaacaacagtcaatattaagagacaaaagaaaaaagggaagattgagattgagtttttctcaaatgaagatcttgaacgtatcctggaactattgtccgaaagagaagcgtaaaaaccatcttttttaaaaaagatggttttttatatacgtcttgtcagcttatgaaacggactgagccgttcctgccggccttctgatttatctgtcagctgtaacccctctgctaaaacatttgccatgctcataacaagatgaagcctcgtattctgcaggacaaaatactccataaacccgctgacattgacgattccattgatatggacgtcaccgatttcaggaaggtctttttgaacacctgctccgggcttcagcggcccatcgccgatttgaaatgagcctacgcttttgacgcggcctaaacaagcatcaaccgctataataaacggatttttatgtagatgttgaatatctttcagcttgtctttcatattgacggcgtgaacaggatctgacagcgtgccgtaaacgtgcaatctgcctaaattcattttttctaactttgttcctacgagcggacctaatgaatctccggtcgaccgatctgtaccgatacacacggtgactaacggtctgccggctgctttacgtaaagatgaagtaaggattgcttgtatttgattcgcagcagaagaatccgtatgggatacatattgttttgcccgttcttgagaaaaaagcccgccttttcgattcataaggttcacttccttgtcatgtcatacgagtattacattgttgtttttggtgatgtatggttgtttacagtatatccagcgctgcctttttttatgcttatgtcatgatgagcatgccggttgtttgaaaagagcggatagaaaaaagaactcagagcagttattctctaagttcatgaaagaaataagaccatatgatctacatcaacatattgctgatgatctaattccagcgctcttttttctgcagagaagaggataatcctaactgagcgcagagtttttttgcgggttccatttgttgaagtaacagagagatggagctgttctgtgtctttcatcttttttgcccggctgatggcttccgtcattaaagcttttcccgcgcctgaccctaggtgtttgggggaaatatacatagaaccgataaccgcaatgtgtcttagtttaaacagcagatgcttggagatcttgaggattcctatcaggctgtcttgttcaaaggcgccaagcaagatggcattgccggcttcaagcctggctttgcatttttcggacggcctcatagctgacggcgattgcgtccgggtgatcttttaaagctttgagcctgaatcggagtaaggctgggtatcacttgcggttaaacgcctgatgtccatgatttgagcgcctaacataaataaattttctgaatagtcaatcgtcgttatcataccatatttgtcccatttgtatgaatgtttgctgctgtcactcaatatagtagcaatatgcggagatgatcagaaattttatgaggtgatgagggtgtggagagccgggatgaagtggatgctgctcatattaagcagccagattggggccgggtatgcaagcgggcaggaaatatggcagtttttcggtgtcgaaagcggactggctattgtattgtttacagtcatgtttacgatttcggcttatattgtgttgaagatcagctatcgggttcaatcaacgcactttttacctgtgcttgagcatctgatgggaccggctcttgctaaagtctatgatgtgcttattatgttttatttgttttcaatgacgatggttatgattgccggcggcggtgtgacgctgcaaatgtacaagctgccgttttggatcggtatttttcttctttgcattgtgaccgtgggtttattcttttgggatataaaagggatattatctctgaatagtattttgataccgattcttgtagcggggctgttatatgcattggtcttttttcagacaacgcatcattacacgtggacgatagacttgacccgccagtataattggccggcaagcattaccttcacgtccttaaacattctttctgttgtcgctgttctttcttcaatcgggaaagatatgaagggactgggagaagccaaaatcgcaagcgttgcaagcgggctgattttcggtatgatttcatttgtttacaatgaaacgcttgtacagctttcaggcagtcttacacaatatgagattcctcttttcgccgtccttgaaggcgctccttatccgttatttctttgtatggccgccgtgctttttttagccatctatacgacaacggtgaccggtcttttcgggctgtccagccgcatgcttgcatttgtgaaattgccgagatggacgctcgtatctcttcttttagctgtgatggtgccttttacgacaatcggtttttcagatttgatcgccattttatatcccatttacgggcttttaagtctttatttgctggtatgtcttcttctttaccctattttagggagatggaaaaaagtataatgctcattttgagtgcggccgttgctcttatcctgtctttttttgtacaataaataaagcagtctatggagagaggtgaagggtcttggcggataaagactttggcctgaatgatattgttgaaatgaagaaaccgcatccttgcggtgaaaacaggtggaaaatcattcggatgggaatggatattcggatcaaatgcacgggttgttcccacagtgtcatgattccgagaagagattttgagagaaagctgaaaaaagtactcgtcaagcatgaggagcctacatcataagggctggcgctcatgctttttcatatagaggagaggaagaggcccgatgagcaaagtgcatcagtcagcgtgcccgctgaattgctgggacagctgcggctttttggtgacagttgaggatggaaaggtgacgaaagtagacggagacccgaatcatcccattacggaagggaaaatttgcggccggggcagaatgctggagacgaaaacgaatgcgccggaacggcttcgttttcctttaaaaaagaaagacggcgaatttgtccgcatttcctgggagcaggcgttagatgaaattgctgaaaaaatgacggtgattaaggagacgttgggcactgccgcagtgctgcacagtcatgactacgccaataacggtcttttgaaggcgctcgaccagcgttttttcaatggatacggcggtgtaaccgagattgcgggcagcatttgctggggttccggcattgaagcgcagcgctgggatttcgggcgttcttacgggcatggaccgcttgatatttatcacagcaagcatgtgatcgtatggggcagaaacgtgtcccggacgaatatgcacctctatcatcatctgcagcaggtgaagaaaaaaggagcgacactgacggtcattgaccctatttttaacccgactgcaaagcttgccgaccggtatatatccgtcaaacccggcatggatggctggcttgcggcgggtgttttaaaaatattatgccaaaccggcagaaccgattctgattttattcaaaagcattcggtcggttttgaggaaatagacaagcttctgcagacgatttcttttgaggagatcattgagaaaacagaaacgtctttagaagcgcttgaatatcttgccgatttatatgctgacggtcccgcctccacttttatgggtcttgggatgcagagatataaaaacgggggcgggacgatacggtggattgacgctttagctgcggcgagcggaaatgtcggtatcaaaggcggcggcgccaacttcggaaatgtgcaagtcggtgaaagctttgcaaaggccgagctcactcgtcctgatttgaagaaaagttcgagaacgttttcgatgatgactcaagctgaagaggcgctgaatgcagccgacccgccgattgagatgatcatcgtgacgtgcggcaatccgctgacacaggtgccgaatacaaaaaaagtgaaggaagcgtttgaaaaaacgccggtcacagtggccattgattcggtcatgaccgatacggcgaagctctgtgactatgtgctgccgacggccgttgttttcgaagaggaagatatttattattccagcatgtatcatcactatgttcaatatggtaagaagcttgcggaaccgcagggagaggcaaaatcagaccgctggatctggacggaactcgcaaagcgtctcggattcggggagctgtttgattacagtgcggaagatttcttaaaaatggggctctcttctttggagaaagaaggaatcacccttgagcaattaaaggaaaaaggacatatgccgcttccggttaaacaggttccgtggagtgattttcaatttttaaccccgagcggaaaatttgaattcgtctcgtcactggcagaagagaaaggatacagcggcctccctcaattggaagtgccggaggagtccgtttatcacgacgccggactggccgggaaatatccgtatacgctgctgtccattcacccgcagcgctccaatcattcacagcacgtgccgtttattgaaaagctccagcagattcaggtggacctgtcgccggatatcgccgaggagctttcacttcaagacggagatacggcagaggtatacaatgaccgcggccgtctgcgcggcagggtgaaaatcatgaagcaggctcacccgaagacggtgaatatagatgaaggcatgtgggcggcattcggaggctccgtcaacatgctcacaaaggattcaaattccgataatggaatgggaagtacgctttttgactgtctggtagcggttaaaaaagggtaatctaaggagagagagggcgggaaatgcttttttctcagcttgtcttttcctatgaacctccttataattgctctaggtttacaatacgtttatacgatgatggtttgatatagaggagatgaaagaatggctttaactgctggaattgtcggtttgccgaatgtcggaaaatcgacgttatttaatgcaattacccaggctggtgccgaatcagccaactacccgttctgtacaattgatccgaacgtgggaatcgtggaagtgccggatgaacgtctgcaaaagctgactgaattggtgaacccgaaaaaaacagtgccgactgcgtttgaattcactgatatcgcggggatcgtaaaaggcgcatctaaaggtgaaggactcggaaataagtttctttctcatatccgtcaggttgatgcgatctgccacgttgtacgtgcattcgctgatgacaatattacgcacgtgtcagggaaagtcgatccgattgacgatattgaaacgatcaatcttgaattgattcttgccgacatggagacagtcgaaaaacgcatcacgcgtgtaagcaagcttgcgaagcaaaaagacaaagaagcggtttttgaatttgacattctgtctaaattgaaagaagctttcgaacaagaaaagcctgcccgttccgttgaatttacggaagaacagcaaaagcttgtgaagcagcttcatttgcttacgtcaaaacccgtgctttatgtggcgaatgtaagcgaagatgaagtggctgatccttcagacaatgaatacgttgcgaaaatccgtgagtacgccgcgggtgaaaatgccgaagttatcgtcgtctgtgcgaaaattgagtctgaaattgctgaattggaaggcgaagaaaagcaaatgttccttgaggagctcggcatcgaagaatcaggtcttgatcagctgattaaagcgtcatactctcttctcggccttgcgacatactttacggcgggcgaacaggaagtgcgcgcatggacattcagaaaaggcatgaaagctcctgagtgtgcgggtatcatccacactgactttgaacgcggctttatccgcgctgaaacggttgcttatgaagaccttttggcaggcggcggaatgtccggagcgaaagaagccggaaaagtgcgtctggaaggtaaggaatatgtagtccaagacggagatgtcattcatttccgatttaatgtataggacacagttgtaaagggacaagagctttggtataatataaacttgtgagtaatagaattattgctccttgcccattatagggccgcttagaccaaaaggaggtgcaaacagatgaaaaagtacgaagttatgtacattatccgtccgaacattgacgaagagtcaaagaaggcagttatcgagcgtttcaacaacgtattgacttctaacggagcggagatcactggaacaaaagattggggtaaacgtcgtcttgcttacgaaatcaacgatttccgtgacggtttctaccaaatcttaaacgttcagtctgaagctgcagcggttgctgaattcgaccgtttagctaagatcagtgacgatatcattcgccacatcgttgttaaagaagaagaataagcaatttgaaatatataatgttaaaaggtggtctttcatatgcttaaccgagttgtattagtcggaagactgacaaaagacccagagcttcgttatacgccaagcggtgcggctgtcgccacgtttactcttgctgtgaatcgtacattcacgaaccagtccggagaacgtgaagccgatttcattaattgtgtcacttggagaagacaagccgaaaacgttgcaaactttcttaaaaaaggaagccttgccggcgtagacggccgactccagacaagaaattatgaaaatcagcagggacagcgtgtcttcgtgacagaagtccaagctgaaagtgttcaatttcttgagcctaaaaacagcggcggttctggatcaggcggatacaacgaaggaaacagcggcggaggccaatactttggcggaggccaaaatgataatccgttcggcggaaatcagaacaaccagagacgaaatcaagggaacagctttaatgatgatccatttgccaacgacggcaagccgattgacatctcggatgatgatcttccgttctaatagattatcgctatattcataacgagaaaggtgggaaatgacaatggcaggaggacgcagaggcggtcgtgcgaaacgccgtaaggtttgttacttcacttctaacggcattacgcacatcgattacaaagatgtagatcttcttagaaagtttgtttctgagcgtggtaaaatcttacctcgccgtgtaactggaacaaacgcgaaataccaacgtaaattgactatcgcgatcaaacgcgcacgtcaaatggctttacttccatacgtaactggcgagtaagccgaaagaaaagagcaagagcctgcgggctcctgctctttttttatatcagtcctcctccatcctgccgaaatgtttcacatgaaacatggaagtgctcctgacatctatctttgttatcttgctcctctattcaaatacgcgtacttatgcaatgaatttgtttatactgaagaacagggggtggctgagatggagacagacagaaatatcctgactgatgaaaagtggagcgcaatcatacgcaatgatgcttcttatgacggggcattttattatgcagtaaagacgacggggattttctgccggccttcttgtaaatcgagagctccgaataaagaaaacgtgctggtgtttgatacggctgatgcagcgcttgataaacattttcgtccctgtaaaaggtgccggccgaacggtcttcgtcttcctgatgaagaatggattgctcaaatcattgagtacattgaccgccattatcacgaatctctgactctgagtgtactggccgaaatgtgtcacggcagcccttatcatttacagcggacatttaaaaaaatcaggggaatatccccgattgagtatatacagaacataagattggcgaaggcggaacaccttttaaagcatactgatatgacagtcatggagattgctctgacggtcggaattccaaacacagcgcattttgccactctttttaaaaagagaaccgggaattcgcccacagaataccgaaaaactgccggaatgggacagggaggttcaatatgagtaaagagacaatggtctattggacacttttcacacggaatgattggagcctgtatacagccgccacatctaaagggctttgctttataggttcaaatcatggaagctttgaagagcttgagcagtgggcaaaaaaatcactgccgcaataccgattggcacgtgatgatgagaagctggcgtcttacacggcagagctgtccgagtacatcgaaaatggcagatcagctttttcagtgccggtggatctttacgggacagaatttcagcttgctgtatggaaagcgcttatggacataccgtacggcgagacatactcctattcggatatagcagaaatgattcagaaaccggcagccgtaagagccgtgggcgccgcaatcgggaaaaatccggtattgattacggttccgtgccatcgcgtcatcggaaaaaacggaaaactgaccggattcagaggcggtttagaaatgaaaaagcagatgctggcattagagggcggaaacattgaaacactggaatgccggctgagccggacaggggggaacacatgaaactgatttcttggaatgtaaacggcttacgtgccgtgatgaaaaagatagatatcaatacttacgttcaggaaacgaaagccgatattttatgtctgcaagaaacgaaagtacaggacggacaagtatcattacagcttgaagggtatcatgactattggaactacgcggtgaaaaaaggctactcaggcacggctgttttttcgaaagaaaagccgcttcacgtgttttatggactgggaattgacgatcatgatcaagaaggacgggtgatcacacttgaatttgagaacctgttcgtcgtcaactgttatacgccgaatgccaaacgcggattagagcgaattgattaccgtcttcaatgggaagccgattttaaggagtatctgcagaagcttgaccggaagaagcccgtgatattatgcggcgatctgaatgtcgcacacagggagatagatttaaaaaatccgaaagccaaccggaagaacgccggtttctcggatcaggagcgggaagcgttcagcgccctgctgaacaccggatttaccgactcattccgctatttatatcctgatcgggaaggcgcctattcctggtggtcttacaggacgaacgcacgtgagaaaaacatcggctggcggcttgattacgtcattgtttcagacagactgaagccgcggatcagcgaagcggccatttgcgccgatatcatgggttctgaccattgccctgttgaaatgacagtggatttatgatgagatagcagtaagagaaatccactcttgctgcttttttatcaccaaaaatggaggagcacatggcaaatataaaagagattgcgaaactggcgaatgtgtcggtggctaccgtatcacgcgtattaaaccgacacccgtacgtatctgaggagaaaaggcgtcttgtgaatcaagtgatgaaggagatggattatacccctaatcgaaccgccattgatctgattcgaggaaagaccaatacaatcggcgtgattttgccgtacagcgaccatccctgctttgacaaaattgtaaacggtatcacgaaggaagcgtttgcccatgattacgtgacaacccttctccccaccaactatgaccccgctatagagatgacctatttcgaactgctgaaaatgaaaaagattgacggactgattgtcacgtcccgcgcgaatgaatgggaaaccgctgtgccttatctggagtacggtcccattgtcgcttgtgaatatacgcagcatcaagagattccctgcgcttataatgacaggcaggcagcttacagagaaagctttttgtatttgaaaaaccgcgggcatcaagatgttgcttttacatgtgtgcgggaagcggaaaaaagcccgagtacggccgacaaggtaaccgcatataaggcggttttcggctctcttgatgaaacccgcattctgatcggatgccatgatatggacgacggaaagcgggcaggtgaacacttctggggtttccacaaggcgccgacggccatctatgcgcacagtgatgatgtggctgccggcttgtaccagtttgcgaaagaacagaaatgggacgcggagatcatcggcgagggaaacctgagcgtcagccgggcattgaatatcccatctctggaacttcatttggaacgggtcggaagggaagcatttttgctgtttttgcacggagaaacggctaaaaaacaaattatgcatcaatttcagcggaaaaagtcttgagctgaaatgggtttcatgctttataactagattgagaaaaaaaaaggaggcggacatatgcgaattgaacatgcggccatatgggtgaaagatttagaacggatgaaagaattttatgagaaatacttcggcgccaaggccaatgacctttatcataatgagaaaaaagatttcaaatcgtattttctttcgtttgactccggatgcaggctggaacttatgaaaaaaggcggcattgatgaagctccgtcacagaatatgaccggatgggcgcatctcgcattttctacaggcagcaaggagcgggtgaatgaattgacggagacgtttaaaaatgacggatttcaggttgtaagcggcccgcgcgtgacgggtgacggatattatgagagcgtgatagaggatggggaaggcaatttgatagaaatcacagtgtaacagtgcgggggaacccgcactgttttattgattaaatttgctgagcattagttttcggaccgaatagaattaacaaaacggaacatagaagccagcagccgccgatgaacaaaaagacgctgatgtagccgagcttaacggcaataaatccgacgagcagggatccgaatatattggaaaaacggccgagcccgtatgccagcccgctcccggccgagcgatattccgtaggatacggctccgatgtatatgcgtataagtttgaggtgaaaacccgttccgtgacattgacgacaaatccaaacacaataatcatgacgggaataaacgtcatgccgtataacagtccggcaatggcagtcagaaaagcgcttgcggccagaatccattttctttggaacgtctcggatatcatggaaccgagcaatgcgccaagcggtgcgccgacagagtgaagcacattgtaccacagcgttttttccatggtgatgccgttgcttttcagcaggctgggcacccatgaagcaaagccgtaaaagccaaaggtttcaagaatccataccgctgacaggatgatggtgatctttaaattcctgccctgaaacagccctaagtagcctgcgtgcttcactgtatgtacttctgccgcctcttttggcgcgggaagcgggcctttttctttctctatacgtgcttcaagacggttcataatggcgtttgcctgatcatatgcgccccgattttcgtgccagcgcggcgattcctcaagccggcggataaaaaagaaataaatgagaccggccgccccccatacgaatacgagccgccacccccatgagcctaaaggaatgacaaaagcggaaacaacgtttgtgacgggaacgccgatcagtccgatcatggcgcaaaaggagatgtattttcctcgtacggatgatggaaaaaattccgccaaatagctgttcgtcacaatcatggcggccgcgacgccgagcccggtcaagaagcggaaaatcattaaggacggaatgtcccatgccagcgcattcagaaaagatgagatcgaaaagacaaggacaaaacaattcagcgcttttttcctgccgatccgatcggacagtcttccgccgatggaggcgcctaaaaacatgcccaggaaggatgcggctgtgacgtcggcaatgacggacagcttcacgccccaatgctcaatcagcgccggagccacgttgctgagcgtaaacagatcagcgagatcgaaaaaatagatgattccgagagcggttaatacttgatagtgcacacgcgaaatggggagacggtctaatcggttcgctacatttgagaatgtctgatgtttcataaaaaaccccctgacttagcaattgtaatcagaaaatactgtaaatttatctgacgaatacattataaaggtctttttttggcaaaaacagagtgtaaataaccagagccaaaggaaacggcatagcgctttcttcttaaaatatataacatttcctatatctgtttctgtttatattgtaaaatgttgaaggaaaggaagttgatgcataaatatgaatacatttgtacggcccgcagagggaagaaatagtgtatcgagatatcttctttctctgttgctcattgtgggtttgttctttttcggaagcatactgaccgtgttttatatgtttctcacgtccgctttcaatccttcactgacgataaattgggatgaggcggcattaagtgacccgctggcggatatttatttacagcatatcgtctatttcatagcgattccgggcatttggatagcggttcgtttcattatgaagcggcggtttttatccatcattacaccgaatcagtcgctgaactggaagagaattttctttggattcggcacatatgttgtgctgatgtttgtcgcggggctgattgattttttaattcatccggatcgtttcacgcttcaggaattccatgcttcacgttttctgctgctgttagcggcggccgtcttgttggtgccgattcaaacctctgcggaggaatttctctttcgcggttttctgcttcagtttgccggaaaattgacggcaaacgcggtggttctgacggtcattatcggcggattattcggcgcacttcatttcggaaatccggagatggaaaatggagctctctgggcgggaatcggatatgttaccatcggcatgatctggacctttatcacgattaaaacgggcagtctggagatgtcccttggcggtcacgctgccaataatatgtttttatttatctttctcacagaggatcattcggtatacggcggcattccgtcgatatttacaacagcagccggcggctatgaaatatacgattgcatatcgactctggtgatcaacatcatcttcgcatggctcgcattccgttttgtgaaaaaagaaaagcagcaggccgcctaggctctgctgctgatttgtaaggtgttcatcgcttcatcaatatccgtcgtcggcctccggcaggcgaaattctcacaaatgtagaccgttgtcttcccatcgatcatttgataacccgcggcaaagtcagaaatgccggcaagctcatccggatgttctgcggcgagaatcgtataggcgggagtgaaatgctcctgaagcgcctcaatgaaacgttttctgtccgggtcatctttccttccgaacacaacgatttctttttggggcattgtgtgtgccagtacgctttgcatgaagaaagcgctgctgctcggataggcctctatttcccgtttgaacacggaaaacatcgcttcggctttttcaatcagtgatacatcacccgtcaggcggccgagacgaagcaactgtacggcagccgcgctgtttccggaaggcacggctccgtcataaacctctttttccctgacaagaagagtctcggcatcattccccgtaaagaaaaaacctccgtgccgttcatcccagaacagctccagcatgcttgtacataacgttttcgctttctgcagataagacggatgaaaacccgcttcatacaattcaaggtaagcccagatgagaaaagcgtaatcatcgataaaccctttgtttttcacttcgccctcgcggtatcggaccatgacgcgcccgtccggcatgaggtgacgttcgagaaagcggatcgctgtttccgccatgctgagaaagtcaggctcgtgaaatacctttgcggcttttgccagcccggcaatcatgagcgcgttccatgaggtcagcactttgtcatctgtatgcggatagcttctgttttcacgcgcttccagcaattttgttcttgcctcttcaaggcgttcggccagctcatgtccggtgaggccggtctcttcgaggatggcctcacgccgcgtgaaaatgaggtgcgggatgttttcgccttcaaaattgccttgatctgtgatgttatacaccttgcaataaagcgggccgagttcatcaccgagaagattcatgatttcttttttggaccatatgtaatatttcccctcacggccttcggtatcagcatctaaagctgagaaaaagctgccgtcttcatgcatcatttcccgctgaataaacgttacgatctgcatcgcaatctgtttgtagcgctcattacccgtgacttgataggcttccgtataggcggtcaggagaagggcgttgtcatacagcattttctcaaaatgcggcacgagccattcattatcagtcgagtagcgggcgaatccgaacccgatgtgatcaaaaattccgccgttcgccatgccgtcgagtgtcttggttacgccggccaaagcctgttccttgcccgtatagctgtagtagcgaagcagaaacatgagcatatgcggcatcggaaatttcggagcctggccgaacccgccgtacaccgtgtcaaacccgccggccagctggcgatacgtgtcatgaaccgcctgttcgccaagcatgccctcagccgggtgaatcttgacttcaagatgagcggcggcgttttcggcgatatcctcgacatgctgccggtcattcgcaaacgtttcggacagatgttcaagcacatcaataaagcccggacggttaaatttgctcgtcttcggaaaatacgtccccgcataaaacggcttctgatctggtgtgacgaacacgttcagcggccacccgccctgccccgtcatcagctggcagattctcatatacacggaatccacatcaggccgctcttcacgatcaaccttgatggctatgaatttatcgtttaacataccggcgatctcttcgtcctcaaaggactcgtgagccattacatggcaccaatgacaagtcgaatagccgatgctgacaagaaccggcttgttttcgcgttttgctttttcgaaggcttcttctccccaagggtgccagtttacggggttgtgggcgtgttgaagtaaatatggagatttctcagcgattaatctattgggtgtactgttatttggcattggatcaccttctttcacttttaaattggttgctatttttactttaccataatggagtttagtttataccttattagattaactagattagattttatctactcgtctaaggaacaccagtcattttgcgcacaatttttttgcaaaataaagacttataaacatttgctgtttcttgtaaagtggtaactaataaagaaataatgaaacaaacgatagaggtttagtacaaatttataagacgttgattatttatacaggaggagagaattaacaatggcatatttatatttattgctcgcaatttttggtgaacttattggttcctctatgctcaaggccgcagaaggcttcacgaaactttaccctactattggtgcaattattgcttttataggttcctttttcttcttatcacttgcaatgaagtccatacctttgaataccgcctatgcagtttggtctggtgtagggactattgctactacaataatttcgattttgatttggaaagaaaaaattaacattgccagtgttactgggattgttttgatacttgtaggagttgtaatattaaatctttttggacctggtcatggtgaagcacatagtgttgaaaacgcaagcgcaacaacaaacaatgaaaaaataattgagtagtgaactgtttgatagtgaagtctataaaacctcacttttttatttatagtcatataatatttgaatgtcatcatctttcatgaaaagtaaagtctcttcgtttttaagttgttcaattgcttcattgactgtttgatccaatttagatttgggtctgtccttttcttctctaccgaccaaaaaatcagtggatacatcatataaatcagcgagtttctttaatgtctccggatcgggcgatctataatccctttcgtaattagacaatgtctaccctgttaatccaattttctctgctggcacgtcttgattagagtaaccggatttttttcgagcccattttaatctttggcctaatgtcatttgttatcatccattccacaaagagttgattaattattataatatcagcaattgctgaccctttcataaagtagaacaaaaaggcgaacattaacctttgactctccgaatcggagggttaaacttaatctgtagttttattcattttgttgtctcgtccatactttcgtaaaaattctccgaaggcatcttgaagcacaaaaaagctctgactaattaatttagtcagagcttttttttatgaagtattcccgagtatctgtccttgtttttttaggcaatactacgtccaattctttatttaaccatgcgagcgttttattacgaagataattacgcatctgttcttctgcttcaagcattaccaagttaattgtacaagaagaattgctggattcacaagagttgcatttgtctcgataaagtagaccattgcttacaatatttttacattggaaaatgggttttggtccttcaacagcctctattacatcccaaaaggaaatatcctccggggattttgctaacctatatcctccctttacaccagggacagaatttacaataccagctttagataatttaccgaaaacttttgaaagaaatgtttctgaaagtccttggaactctgcaaggtcccgaatcccgacactttccttggagggaacatctattaaataaaccagacaatgtaaagcatattcaaccccaacactgtactgcatataaactcacctgcttttgattttaaggtttatcacattgtatcttaggagtatttttgatgatagtcaatcttaaaacccttcttcagatactatttgttccgtttgacaaaataaaatacaaggtttatattagtgaccaagttaatcgtcgattaatatagtctttaatataaaatgaaaggagagtttcaaatgagcaaaacacttatcattaacgcacatccaaaagtagatgatacgtcatcatacagtctacgggtaatgaaccactttttagaggcttacaaagaattaattccagagagtgaagagcttgagcaaattaacttatatagtgatgatgtgcctatgattgataaaacagttttaagtgcatgggataaggcagaaaaatgcgaagaactgacaagcgatgaacaaaaagtaacaggacgcatgacagaagtattgaaacaattcaaaagtgcaaaaacgtatgtcattgttttgcctttgcataatttcaatattccatcaaaattaaaagactatatggacaatattatgatcgcacgtgaaacatttagatatactgacactgggtcagtaggtctgcttaaagatggacgaagaatgcttgtcatacaagctagcggatcaatttatacaaatgatgactggtatgaagaagttgaatactcaaataaatatctgaaatcaatgttcaatttcctcggtattgaggattatcaaattatccgagtgcaaggaacagctttactgagtccggaggatgttttacaaaaagcaaataaagaagttgaagaagctgcttcaagattggcaggtaaataaggtatagcatgaagatcattgttgctggggggactgcagtaattggtcggtcccttcttcctaaattaatacaaaacggccatcaagtatttgcattgacccgaggtaaccggtcgaacacgttcctcaaaagaataggggtaactcctgtaaaagcagatgcaatggatcgagatgctgttcttaatgcttttaggaaaatttaacctgaggttgttgtccatcagtttacctctttaacaggttacaatcttgaagaaaaagcgagaatcagaattataggtgcgcgaaatactgttgatgcgtgtcatgaaattggagtgaagaggataattgctcaaagtctttcttttgcttatgaacccggattaatacctgccaatgaagacgtccctttagatctcgacgcaccaaatccaaggaaaataaatgtaattggagtggcatcattagaatcagcagttgctgaattacccgatttagtaaacaacattaaaacattgcaagaaaatgggttgaacaatatctcatttgaagtaaatcatgacacgttagagcatctttccagcgtgtttttttatttgtgaaaatgaaaaacctgtcaagaaacaaaagacatacaataatcgcaataaaaacgaaaagaataatttaatcaatagacactttgtacctttttacattttaactttgtcaataaatgttcaatctgccatgtaaattttcaaaattctttacgggagtgggggaatttgcttgcaacaagttttcttgaacaaaggtaacgcccacaaccccgtaaactggcacccttggggagaagaagccttcgaaacccaagtattaaaaaggagaactgcttatgactctattttcagggttaaatgtcatctgctttattgctttttagataagaaataaggatttaaaatctttatctttttatttactgttagataggtgaaacacaccccggcgactgtaaccatcccgcctgtcagtgcaataaacgcaggtacttcacctaaccacacccaagaaatagccaaggctacggctggtgttaaataaagtgaaatggctgcttctgaagcaccgacgagtgaagtgacatacgcaagtgcaaagtaaggcacaaccgttggtaataagcctaagtaaacgacagaccatgtggaattcatcgatgcgtgaacaacttctccccataaccccggaagaaataccagcattggcaatgtcccgccccaaatagtgaatgtaacgaatgggataaatccatatttttttatatagcgggcttgaaaaacgaaataaatactctccgaaaaagctgccagcaagattaacaaaatgccgttcactgaatttgtatagtttcctgccccaaatgaaatgatcgatacacccaataaactaatgatagagccgacccatttataaaaaccgaaatgttcaccaaaaaacagacgggataacattgcagaaaaaataggtgtcatggtcacgagtaagcttgctacccctgcgctgacgtttttttctccgatattcagcaaaatgtgatatagtgcaaaacctaaaaatcctaacgataaaatagcagggatatccttcatgtcaggcaaacgcatatgagtcaaaacagcaaaaaccaccaatgccattgacccaatcaacaagcgaaacaaagcgaggtgttccggcgtgtaactctccaaactcgcgcgaattcccgggaaagctgatgcccacaacccaatcatcagactgtaagctatgccgattcgaactgttttctttctcatctttctcactcctctttacaaaaaccaaccagttatttaatgtttttctatattaataaagatttgatgagatgacttcaaccagttaaatagattttgacccaaccactttaaggaggacccttttaatgagcgctccagaagaaaaaaagatgagaaagcttcctaagtacatacaaatcattcaatttataaaagagaaaataggaaatggagaatggccgatcggaagtaagattccaagccagcgcacgcttgccaaacactttgaggtgaacaggagcacagtcattacagctttagaggaattgacggcggatggattaatcgaaggcagaatgggcaaagggacagttgttacgaacaatacatggacacttttggctaagaattccgctcccgattgggatcagtatgtaacctccggaattcagcagccaagccaaaaaatcgttcaagagatcaataaatcagaatcaaattctgatcttatacagctcagtaaaggagaactttcacatgagatttttcctttagctgttatgaaagagatcatgggaaaggtatcccaaaacatagaggcattcggatatgaggaaccaaaaggatatttgcctttgagagaggcattaagcggctatttaagaacaatcggcattcaagcttctccttcttccattcttattgtttcgggcgcactgcaagccttacagcttatatcaatggggcttttacaaaggggatcgaccgtttatcttgatcagccttcctatctttattcattacacgtatttcaatcagccggtatgaagctgactggagttcctatggatcatgatggacttttgccggaacatatccgcatggcaaggggagaacgggggagggctatcttatatacaaatccttgttttcataatccgacaggtattttaatgtcaaaaaagagacgagaagaaatccttgcggcaagtgagaatacacagcttcccattattgaagatgacatttatcgtgagttatggatagatgagattcccccggatcctattaaaacaatagataaaaatgggcatgtgctttacataggcagtttatcgaaaacattaagtccgggcttgaggattggctggattgtcgggccggaaccagtgattgaacgtttatccgacataaaaatgcaaacagattacggctccagttcgttatcccagagagtagcggcagagtggtttatatccggtgaataccagcagcatctagaacaggtgagaagtcaattaaaggtgagaagagaattggccttgagtgttttagaaactcatttgaaagatgtggcgacatggaatatcccaaagggaggattctttgtctgggtaaaaatattgccttccatatccgtgaaattactttataccaaagccttatcaaaagggattctgctcaatctcggcaggatctatgctgaggaaaaagggagttatattcgcttatcatatgcttatgcatctcttgaagaccttcaaaagggaatttatgaattgggtttgatgattaaggaattggcaagcagataaatttatcataattactttaatagaaagagacatgacaccaatgacacgcggattgttcgctgactacggttggggtgctggttaaaaaatacttaggagaacttgatattcaaagagctgtaagagagagattatctttaaaaccgtcactagcagaagtcttcaaaattatttaagttaatataccggtctttattgagatttgttttaaatatgcatttgaaggtcaattttatgatgactaagaactaagaattacactactttataaccgtaatttattaatgaaatatttcctgaaaaactttgatttttaattgcagattgatataataggtttgttattcttggccaaggatgagaatatttacaaatcttcaaaaagtggtgttagcaattaaaaaacctcatattttattatttatattaatttttacattaggtttttttgcgtgctttttattcatttttaagcatatagagagaaatgaaacagaaaaaattaatcataaccgtgtacaagaagtaccatggggagtgaaaaaaatcaatgctgcttcaatatggactttaagagagaaacagaaagtgaaagttgctatattagacagtggtattgataaagagcataaagatttaaaagggaaaattaaaggggaatttaatccaataaacatgactttaacctcagatgatgatgtggggcatggaactgctattgcaggcattatagcagctaaagataatagctttggattagttggaattgctccagacactgagatatattcagttaaagtactaaattcagaaggaaaaggttcgctagatacccttgttaaaggtatagagtggtgtattgataataatattcaggtaataaatttgagttttggattaaccaaagataaaccgttgttaagaggtgcaattgataaagcagtaaacagtgggatcataatcgttgcagccgcaggtaacaattatggcggggatgttgattatccagcagcttatgaaaaagttctctctattaatgctgtagatagaaataataaactagctaacttttcacctaaaggaaagattgacttttctgcacctggtgtagatataccgatactatccctcaataatggatataaaactgaaagtggtacatctttagcagctgcacatgttaccggagtaatatcattaattttacaaaatagagataaattcggaattgattcaaaagaggatatttataatcaagttaaccgtgtattgtccaaattgtccatcgatcttggaaagaaagggagagatgaaatttatggaaaaggatttttatcttttaagtaaaggggctaatttcaatgaaatgttttaaaaagagtattgctgtttttttaagtctaatattaacttttacttttattttacataatgaatcaaaagctgaggctataaacaataggtattaccaaattgtaacaaatgatgaagagaaattagtaatcacagcagaaaaaggcggagttaaaggtttaatgactttagataaagaaaatatgaaactttcattaataaccgatgaaacttctcagaagactggagaaaaaggtaaagaatataaagttgatattgaaaatgctacaaatgagaagatagaagcaacttttactgatacggaaacaaataaaaagtatgagattaattcagatgaggtaacagcttcttttgtttggtttatacctataggaatagttattggagaggcacttttagcgcatttaatttcaattggattagctgtgactatttcaggagtgacttatgttgcctattctgagtttaagaagcgtaaaagaacctattctcattatatggcagtaagaaagtctaaaggattatttatcggtaatggtttgaaaagacctgctgcaattgcacgccttaaaaggggtgatgacacttggtctacgtcgaagaacaatgccaaatctattgctaaagccgcaagtccgattaaaaaaattgttggtccggagatagataaaaagggtaaaggtaaacattatcattatcactcgatctctaggtataaacatggaaaaggtgtccgtatgaaagctcatgctttctatggggcagcaagataatttagattaatttataaacacctaactttaaagtaattaaaagataggaaattataataggagaaggaggtaactatgttaattattgatcacaacccaaaggatcagctgtattcagagttaattgatttggctttcgagatttgcgacgaatttcatttagttttaagaaaagatatgggatctttaaaatcattcgatcctctgttaaaaaaacttgaaagttcgttaaaagtaatgaaagagcaatcagaatgggccagtaccattctaggagacaatcaaaaagcaaaagtttattactattatacagatgaaaacgcaaaaaacattctgaaagaatccgcaaattctttatattcttgggagcagccacatttaccagaagacttgtctttttttaaagatggaaaggagtggttggtaacatgctctcatgaagaagaaagttatatcgatactgaagatgataaagaaatacaaagaatattgagtataccaggattaaaagtgcattttgaaagatgggattaaaatcattcaattttttataaaaaaattgaatgattttagtgaataatatatataagtaaggaaaccgtatagaatggtttccttacttattaaaccaacattactcaattgggatttttcttgtttatttcttgactaatacatattgtttatcttccaaatagaatatatgactaaggtgatttatatctttaaactttatatgttttccaaattgtaaagtatttaaattgataactacacccatgctttcatctttatcttcatcttcatatccatctaagcaggaatatatttcaattgattcaccttttgacaagtgtttttcaatgaaaagaaaaagtgatttaatagatttacgttggccaggtgtattgttggcatgtaagtacccttgtaattcatatatataaggatgtgtgaatttgtttctgactgcttcatatccaggatctaaatgaacaatatcaattccgtatgcatcttcttctgtgtcataaacctttacaagtgaattttcactgttctttcgattgtttttaaattgagagcgtttgttgacatctccttttatttttagttcagaaatgggcttaagtgtaggattactgccatactcaccaataggaagttctttatccgccccaataaaatgatgtaaagtcaatctatttcctcctttatcttatacaactaaaaatactcaatctgactttggataatgagatcttttttgtgtgtctatgataccccgtgtttcttgcctcatcaaggcttgataatgtttgaaggctgaagatggatgatgtgactgatttttaggctccttagggaaagaggaaccgaattaatttaatttaattgttatattgttgacgcatactccatcaatgtccatttagatggtatttttacagctgcagatttttcttcgactatttctaatgttctttcaagttgattatatatgtatccggaaaattaagtataccgtttgaccaatttcagcgttatgaagatttcgttgccagaataccaacaattgaagataaattgaagcagaatagtattaattctaaaaagtgcgggcgcattatggggagaggggaatcttacacacttatctgcagcttcacccacatactttgtgaaagctccaacagcttcttcgcattctgcaagacaacaactattccgttgctttttaacattttcacattacaggattcaggataaaaaagccgccaacagggcggcttttcttaagttaatataccaaatatatatcaaacttcaatctgtatagctatgtctttcctaaaaaaccatcggcttggttcttgaagagtaaatcatttaacccaaagcactattactcctgcagatgaaatttagattattgggctgtatagccgccatccattacgacggcctgccctgtaactccattagctttgtcactggcgaggaatactgcgtaatcagcgatttcttgcacggctaacaaacgtttttgaggaaccaaggggtaaatgacttcttcaaacaccttttctatagaaatgcctctagtctctgcaatatcttgtaactggttttgtaccaatggagtgtcgatatatcccggacacaaggcattgacagtaattccgtattccgctccttctaatgctgatactttagttaaaccgatcaaaccgtgtttagcgctgcaataagctgctttccctgcaaaaccaattaaaccatttatggaagccatattgatgatgcggccaaatttttgttttttcatcaaagggaacgctctttttgtcgcactaaaaggagcagtaatcattaatttcagcataaattcaaatttatcagtcgggaagttttctatatcagacacatgctgaatccccgcattgtttaccagaatatccattcgcccaaaggtttcaagtgtcttagagaaacttttttcaacttgttcttcgtttgttacatcacaaaccgcaggcaggacttcatatccttgtcccttaagttcctcagctgcatgatgcacggctttttcgttcaaatcggaaattaccacttttgcgccttctttagcgaattcacgtgcaatttctaaaccaattccgctagccgcgcctgtcacaagagcaactttactttctaataatttactcatagtaacccctccaggaaacattttggtctcctaaaagtttacacccggcagttgtataagtaaaatgaataaaaagaatataatgtattcgttaaactcatgaaatggagatcatacgatggatatacgccaaatcacatactttcttgaagttgctaaatccaacagttttactaaggcatcagaaaatctgcatttgtcacagcctgccttaagtaagatggttaaaagtttggaagaggaattaaaggttgatctcattgatcgatccgctagacaaatcgctttgacagatgcgggcgaaattgtatttgagcaaggccaaatgattatgaagtcattagatgacttgtcgacgaacttatacgatcttttgcatttaaaaaaaggaaaagtgaaaattggaataccgccgctgatcggtgtcttgttttttcctaaaatcattagagggtttaaacaattgtatcctgatgtgaacatcaagctgatagaacatggaggaaacaaggtgaaaaaggaggttgaagatggagtactggatcttggcgtggttattgaaccagtggacaaagagcagtttgatatcattccattgcttaatgaagaactgatgctcttcgttcattccgctcacccgcttgttcataaagagattgtggaaatgcaagacttgaaaaatgaacctttcatcctgtttagtgaagacttttctcttcacgatcggattattcaggagtgtattagagccggttttcgtccaaatattgtttatgaaagttctcaatgggattttatcagcgaaatgattggagaagaactaggtatttccattttccctcagtcgatagtgaaaaagactgatcaaagtttagttaaggcaatctccattgtcaatccatccattccttggaaagtggcgattattttaaaaaaaggaaaatacgtttcacacgcagtacgcgaatttatccggtatatttcatctttttgtaagagtaattacgtagactaagatcactcatgaaaaaaatgaatggtttttatagtttttatgtattttacggttagagagggctgcgatatattatcttatgtcaggaaataagtacctttcaggaggaatttcaaatggatcaaagccgttaccagcaaggtttagacaaattaatggagtacactttaacaaacgatgataaaatttctacgcatttaaagatttctgaagacttgaaagatatcgctccagatgtaagtaagtacattatagaatttgcttacggagatatatattcacgaccgggattaaccaatcaacaacgtgcgcttgttaccatttcatcccttgtaacgcaaggaaccgagccgcagcttgaacttcatatcaatacagggcttacatccggattaacaccgactgagattgtagagagtatcacccaattggttccttatacaggcttcccgcgtgtacttaatgctctttcagtagctaagaaggtgtttgcacagcggcatgtagaaagccattgagaaataaagagcttgtatggaatgcgggatgaagtagtataaactcatcaatagaatatacacaaaacgacagcctataaggctgtttttaacacaaatgtctgacctcttttttgttttcggctgatcatatgtaaaagcgattatatgaatcgctttttgatacttagaaacatgctaaccttcgacctctttatcagtaagcacttttaaagcatttcttacttttaaggcgaagttgacaggtttatcaatcgcttcgaaatgaatatacatcagtctcggtttgtcaaacagccagtgattgtgtagagacgttacaatcagatcatgtttccgaagagcgctgataaatggattgatttctttttgcagaattacagtttctccgctgcaaagagcacggccgtcttttgtcattgattcaaatgaaaacatttgcggaatgagcaaaaatgatcttccgggccgtcccagtacaaccggttttatattcgttcgtgatctcattactgtacaaattccattttcaaacgtatgcatggttccgcccagaatatcgttgaattcgtcacaaagaccatgccgttcaatcatttccccgtcagtttttggtaccgcacgcacagttttagtagtcagaactcttagggcctctcttacttttcttgcaaaattgagaggtttgtcaattgattcaaaatgcataaacatcagacgcggtttatcaaacagccaatggttatgaacggcagttacgatgataccgaatttgcgcagttcactcattaatgggttcacttcttcttgcagtaaaacagtctcacctaaacataaggctctgccttccgagtccatgctctcaaatgaaaaggcctgaggaataaaaggaaatgcctcggctcttcttccgagtaccaccgggtgaatgttgcttcgaaatcttgtcgccgtacatacgccatttacgacactgggcgttgaattgagaattcttgcaaattctttgcagagtcgtgatggctccatactcgtttcttccacttcatatctcctcctgaaatcaatttaaacgtacttaatagtaaagatatgtgaagatagaaaaaatgtaacgcggcaggagtccataatagagagaatcagcttttttcaccatctcttcaactgttaattattaatagattttaatcggactatttaagatgtgataaaagccttccggatgtgtttgtccattcagtttacattgggtgatgcctttttcttttaccatgttttctcattcgcttatgattactttgcccaacccgtatttgcggtaaggcttcaggatgcagattcgttcgagcttgcctgtttggtttacgatgcggatccgtcctgtgccggcaggctgattctcatgataaaccaagacatgcccgcactgttccccaagcgtatcgaactgatcaaattcatcggattcaggtacttgctgttcctcaatgaatactgcttttctaatctcaagcgctgcttgtaaatcaatttctgttgtatcctcatgatcaaccaacccttttcacatattagtctggactgcacggcttgcttgtggtcttatagaagtaacgacgaaacatttatattgcaagtgcaacaaaaatatgaagggtttgaaaagatatgactgatattttgcgtgaaatcggcatgatcgcacgggcattggattccatcagcaatattgaatttaaagaattagacttaacaaaagggcagtatctctatcttgtgcgtatatgtgaaaacccgggagtgatacaggaaaaactggcggaaatgattaaagttgaccgaacaacagcggcgagagcgatcaaaaaactggaaatacaaggatttgttgaaaagcgtcctgatgatcaaaataaaaaaataaaaaaactgttcccgaccgaaaaagggagaaaggtttatccgttattgcaaagagaaggagagcactctgcggaagtagcactgtccggctttacgtctgaggaaaaagaaaccattttcagccttcttcagcgggtgagaaaaaatatagagcatgattgggaatatgtgaagaagggaaacaaaagagactattaatggatgataattccttttactgaatgattgcgttgtgaatgattaaagtcataaatggatacgttatctgtgaaatctccttcctcggttcctgcttcaactagccgataggcttatttttaacgaaaagtatcaattatggtatatttaaataagacaaaataattgaagcggggaatgatatgagtacaatcgaaaaacaaagacgtaagaaattcagagccaaatcaatcgtacgggtcatcatggtcatcatcggcggaattattgccgcgtatggactggaaaccgtactgattccgaatagtgtatctgacggcggtgtaaccgggctcagcattgtcggttcacagctgtttcatttgcctcttgggatcttgattgcggtgatcaatataccgtttgtctggttaggatataagcaaatcgggaaaggttttgcgtttctatcaattatcggtattgtctcacttgccgcgggcacgagttttttccaccacacgccggctatcattgagggagataccctgttaatcaccgttgtcggcgggattattctcggcttgggaatgggattggcattgcgcaacggcggcgccttagatggaattgatatgctggctgtgcttctgtcacggaaattgccgtttggcacgagcgatctcattttatttttaaacatttttgtgtttatttttgtttcttttgtattcgggctgcaaggcgcattgctttccgtcattgcttactacatcgcatccaaggtgatccatgtggttgaggaaggcttaagcggttctaaaacatttcagattatcaccaacgagcctgcattaatggtagagaccattcgtgaagaattgggccggagcgctacgtataaagaagcatacggcggtttttctcatgaaaaattcaaagaaatcacatgtgtcatcaaccgtttggaagaaaccaaactgaaggaaattattaatgacattgataatcaagcctttgtgacggtatatgatgtcgctgaagtaaaaggcagtaatttcagaaaaatccataatcattaagaaggagctgccgttcaccggcagctttttttaaaaaggagaaaacacttgcaaaaaaagaataacggatgtatattattgatatatcaaacattgactagtcaattaattgcgcaaaagaaagtagggatgggttttgacagcatgttgttcagaggaaggcgagattttgtatcagctccaatcactgcacaaagtgatcggcacgaagtttgaagcgtgcaccggaatcagccaatcccgccttgagcttctcgccgtgcttttttacgtcgatgagatcagccaaagcgatcttcagaaaaaggtgaatattgacggcgcagctgtgacaagacacttgaaacagcttgaagccaaagaaatggtcacaagaaggcggaagcctgaggacaaccgaattatacttgtccggcttactgatcaggggcgggagagaattgaggcttccaaaaaggagaaggagcgtttcataaaggaaatgcttgccggtgtcagcgaggaagaacgcagtatgttaaaaaacgtattgtcgcagatgcagaataatatagaaaatatgaaagcataggagtgtattacacatgaaaacagaactgaaaacaaacgattttatggacattatgaaaggccgccgttccattcggaattacgatccggctgtaaaaatcagcaaagaagaaatgactcaaatattggaagaagcaacgacagcgccgtcttcagttaacgcgcagccatggcgtttcctcgtcattgacagccctgaaggaaaagaaaaactcgcgccgcttgccagctttaaccaaacacaggtcagcacatcatctgcggtgatcgcggttttcgcagatatgaacagtgatgactatttagaagaaatttattcaaaagcggtcgagctgggctacatgccgcaggaagtaaaagacagacaaatcgctgcgttgacggcgcattttgaaaaactgccggagcaagtgaaccgtgaaacgattctgatcgacggaggtcttgtttccatgcagctgatgcttacggcacgcgcgcacggctatgatacaaacccgatcggcggctatgataaagaaaagattgccgaggttttcggaatggataaagagcgttatgtaccggtcatgctgttatcaatcggaaaagcggcagacgaaggatatgcttcctaccgtcttcctatcgaaacaatcgcacaatggaaataaggttgaagtgaagctgagaggagagggacagtggacataattgcggctgttttcgtcggaattgtagctttagaacatatatttatcatgatacttgaaatgttttttatcaattcgaaggctgccaagcggtctttcaaattgccgaagcatttagaaggcgatcggaatgtggcggtcatgtttgcaaatcaaggtctgtataatggatttctggctgccggcctcatttggggactgatcctcggagctgatccgattggccatatgattcaaatgtttttcgtcatctgtgtggtcatcgcggccattttcggaggctttacttcaaacaaatcaattatcgtaaaacaaggacttccggctgttttagcgcttatttttcttttattggcgtagcagacggagtgagtgagggcttccggaaaggaagccctctttttttattctgttttgaaaatcatttcttatatacatcactatagattggggatgtcaaatcagctgtcaccccttcttaattgttatttgctgaaagtcttctatctgctaataaagcctaatagatggagtggactccatgtcaatctgtttttttaaaaaaagctgatcggtaaatatggtatgatttacataatcagggagtggggttgcagaggatgaatatgaagagagcgtattacgctattttatacagccagaccgctatcaacttggggttttcactttatacgatggccgtcatcttgtttttgtttacaaaaaccggttcgacggcgatggcctctcttatgacgctcgtcagcattgtatgccgcgtattgggcagcgccgttttgccgctggtcaccggtcggttcacgcttcgttctttgttaatcagttctcaattgatacagatcacactgttagtctgtttgttttttgtcatccaaaccggttcatccgcattcttttttctgctgttttgtctgatcggaggcatttctttttgcaacggatggtttgctccgataaaaagcgcgctgattggggaaatcattcctcctgatcgaagggcgaaagcgaacagtttattatcggcggcggatcagaccgttcagtttgcggggtggtctctgggcggcgtcatcatagcgttcctgggagagagcgatacaatgatcgtcactgtcatgttattggtttcttcggtgttgggcatcattctgtttcttcaagtacgcatgtgtgcgccggcagcagtcagggaacgttccctttttgcagatgcggcaagcggctgggtgtatttatttcagcaaaaacagctcaaggttctcattgtgatggatgtgatcgaatcgtgggcaggcatgatatggatcgggtctgtgtccttaacttatgtgcatgacgtccttcataaaggagaggcttggtgggggtatgtcaacggagtctattatgcagggacgatgatcggcggactgatcatctataagttatccggtaagcttcagcatcatctcattccgcttatgctgacgggagccttggcatatggaatgttcacgtttatttacgggctgatcacaagcgccgttacggccctttttctggtgctgtgtatggggccggcttgtgtattacgagatctcacgcaggaaacattacttcaaaatatcacgaccgaaaagacacgggtcaatatattagcggcgagatcagctttagttcagttcatttttatgttttccattatcggaacggggattatctcggatgtattcggcgtgcggtttatttatattggcgcaggccttctcttattaatttcggcttttatcggattttctcagctgcgaatgaagaaaatggtacagagcggcatgtagtgtagtataattaggaacgtacgttctatatcgagagaggagagggtaatgtgggacatctggcactgcaattgtatgattatcatctttgggcaaatcagcaaatattcacccggcttaaagagcttccggaggatgtgtaccgtaaggagattcaaagtgtctttccgtcgatagccggtgtattgactcatgtgtatctgtcggataaggggtggtttgatgtgttctccggagagcgtctggaggatacgctgaaatcagctgaacagcaaaaagaggacatcttgtctaaagagatagaagagctggaagatctatttttgaaattatcagaccggtatcaactatttttgcagaaggaggaaaatatcagcctcccccttgaaatagagcatccgtcaggtgacatcatgaaaaccgcagcggccgatatgatcctccatgttgtgaaccacggaacgtatcatcgcgggaatataacagccatgctcagacagatggggtatgcttctgtgccgacggattacggtatttatttatatataaacaaaaagtaaacaagacaggcaacgcggctgtcttgtgatatccgtaaaaaagccaaatcatatgagtgatttggctttttcgtttgctatgccatgttttgcagccgttctaaactgtttttccaattcgcttcaagcgctgtaaaagcagcggcggcatcttgctgttctaatgcgtgaatgatatcagagtgttcattatatgatctgtttaaagcgccgttttcactgaaatagcggatttccagtctctgaattttgactttcaggcttactagcaatttgtgaagttcagcgttgtccgcaagcagaatgatgcgatggtgaaatgcattatccgcttccagaacggccattttatcgccgtctttcatcgtttgaagaagattttcattcagctgtttcaattcttgaatcacggcatcgtccatacgcgggagggcttgctgcaatgcgagtttctcaagcgtccagacgatggaatacaagttttccgcttcttttaactcaatcggagcgacaagtgtccatctgttcgcttttgttatcaccaagccgtcatcttccagccgcaataaggcttcccgtatcggggtgcggctgattcccaatgtttccgacaaatccttgtcctttaactttgtttccggtttgagcttgcccgttatgatccagtttctgagtgtgcgatacacttcgtcccgcatgatggttcttttcagcacaggttctttgttttgattatccaatggaacacctcatgaatcgtagtatacatatttgcattttaccacagtccgggcgccggttagaaatgaagagggacgtctaagaatgaatcgaaccgagatgcttcatctcaatatgctgaaagtcagcggagccgccttcagaaaagagcgtgattccctgatcttcgtgttttgggaacacttcatttgtcaaaacggtttttccgtcgtctgcaaatacttcaatacttgttttatccacgagaattttcagatgaacgcgccctttgtttccgtcaaatggggctttgctttcggtgtatgcaccggttttatcaggctggtctgtaaacgatctgttcacataggcacaaccgtcttctgctgaaataccgacatcaatatgccggctttggtctgctgattctctgagtctgacgcctgcatttttgatatctgaccaagcgatatccatatcaagctgatatgtatcacctttgatcggcagtgtctctgaaccgttcacctgtttgtgttctatgctgtcagttgaagaagttaattggttcaatgcttcaaccggctctgacacaaggctgtatgtgccgccgtcctgctgctgaagacggatttcacggacgatagaatccgtgccgttaaagccgttttttagtgtcggtgtttcattcggataatcccaattgttcatccatgccagcgcatagcgttttgtcagcggatcttcgctattaccgtcttcaaatgtgacgccgccgtaccagtcaaagccgtaatcaagccattgcggttcttcttgatcggcggtaaattccttcccgtcaaagtttccggtccaatacgcgtacgtattcggtttgcctgcgggtttgccgtttgcgcttgcgcccagaacccacttggctgtgccgtcatctgcacgcatcatataaaggtcggggcattcgatgaggccgatctgctgagtgataaaaccgcccgtgtatttccaattttttaaatcgggtgattcataaaaaccgattttttctccttcggccatggccatcacccatttgtcatcctgttcatcccagatcactttcgggtcccggaaatccttagttcccgggtttttcataacgggctgatcactataggaagtaaacgtttttcctttatccgtgctgtaccataaatattgttcctgggcttttgttttggctgtcggctgcgttgtgacggcgaccagcgcgtttttgccgaagcccgcggtgttgtgtttatcaatgacgacagaaccggaccagatatcgccgttttcgttggtgtatttcggaatagccgtgccttcgtccgtccagtgcaccaagtcctttgatacggcgtgccgccattctgtgccgttgccgttcgggtaatcccgattataaagatagtagtaatgatatttcccctcgaaaaaaataggcttttgagggtcgtttttccatttgtccggagtcgtaaaatgatacgccgcccggtaatccttcttatgctccgtgttgtttgtgtcagaggaattgtggtttttgttcggcagtaagccgacaaacaggaacgcacccaaaaagatcaatattacaacgggccattttcgtgccatgattgaattcaccatcttattgagaaataaaagaaaatgccaatgaagtatcggcattttctttttgttgttattagttgttaaccgtaagctgtccttgttcaaggatgctgtttttaacaacggatgttttcttgcctttgatgttcattaagaagcttggcgcaaatgtcgcctttttatcctcaaagaagcctctgtttgtcatgtagcttgtgatcacgacattgttgcctttggcttgcggcactgcgaagtgagagtaagtgaacgttacgtcgttaggatcaagacccatttgcaggacaagaccagttttgttcagcggcttgtaaggacctgttaaagagtttgatacataaccaagcatgtaaatatcgtttgagttaataccgtcgatcgtcatttttgaaccgcgtgaatcagtgaacaggtaccatttgccgttcattttgaaaacattcgcgcgctcgatttcatcagttaccgtgtttgaagtgatcagcggcttcatgacttttttcaatgtgtaatcatcgtttaactctaccataccgagggcgccgttcgctaattcagcatcgcgttttttagcgctttgctgaagcttctgactttctttacggaagaagtttgtgctgccgccgtagtacgctttgttaaataaagattcttcgccttggtatccgttttctgttcccgtgttggcttcgaatacaaggtatttatgtcctttgtcttcaacgtagtgagggtctctcagcgtatggttgtcgccggatgtatagttcccttcatcgataaactgctgaacgttttgatatgtttttccgtcgccgtcaaaaatcgttttatgatcttcaactccgttgatcttgagcgtgtcatcagattttgacacatttacctgcgccgttgtcaggctttgtttgccgtaatgtttaccggaaaagtcagtgtagaataaacggatttttccgtcagatgtaaaggttgcagaaccggaccattcttgtgtctgttctttcaggatttcatcgttggcgtcgaacttatcgctgtctttaaagacacggcccgcgtttttccagctgtcgatcgagttgtcgccgactttttgataaaacatgtagatggatgtgtcatcagcgtctttcgggcttccggcaagagcaaacacgacgtgatagccgttgtattcagctactgttccgtcagcgttttggagcggccagctgtcccacacatccagtcctttcgcggactcgatatttttaattgttgatgggtcgaattgaggcacttggtatttttcactttgctgctgtttagggatctgcagcatatcatggcgtgtgatatgagagacgccgtacgtttctttgtaaggtttttgggtattttctttcgcgaaggcttgagtcgctccccctgccagaagtgcagtcgtaaaagttagaactgtggctcgttttgcaaattttttgatgttcatgttcatgtctccttttgtatgtacctttttttgcgatctgccgattcgatcctcctgcattcatggatgacaggtttgttacagaaaaaaagacctaaaatatgtatggggtgacgccaaagaatacactttgcccttaacacattttaggtcttgcctgctttatcagtaacaatcctgcatgatttacttgtcgacatcattctattagactctgattctattgacaactggtctattttcctcttttggatgatagtaaaatgaaaaaaggccttttaatatatgggtaattgagcctaaggggtgctctggccctaggaaaaaacctctctaaaaaagagaggttattttttcttgatagataataaagcgatggtggttaaaatcagcaaagtacccagccattctgatattccgaagggaacatgcagccagataacagttaaaaaagctgccgacagcggctctgcacaggcgagcaggctggtttcagaggcactcagatatttcaggctttccaagtagcaataaaaagcgatgagcgttccgaaaatgatgataaacacaatcgcggcatatgcaggaaaggaccactcgccttcaaatgtccagggcgggcggatcaagctgagggcggctccgccgatcagcatgccccatcctacaacaatggcggatccccatttcttcagcagacgatgcggctgaagggtgtaaaacgccagtgcaaacgccgaactgattccccaaaagacggccagaccggatatggacaggcttccgacattcccgtgcgtgaccaaaatgaatgtgccggcaaccgccaataagacggcgagcagctcttttcctgaaggaattctctttgcgcgaatcgctaaaaagcatgtaatgatcgccggtcctaaatactgaagaacggtagctgttgccgcgttgccatgctcaattgccgcgaagtaggtgtattgaacacctaacattccgaaaatcccgaataaaagaaggggaattctgtcccgtctgtctttccaaacagcccatatccgtcctttttctttgcggtacgcgattccgagcagaagcgcccctgacaccagaaggcgcaccgaagtcagccattctgtattaaaatggcggtgctggaacagatactgggcaaccgttcccgagaccccccataagatagctcctgtaagcacaagccaaatgcctgttgttcgtgaataagaaagagcagcgtgtttttccaggatagacacccccgattctgatgttgcgacagcaacttacaataattagaaaaatgaacgccttacatgtgatatattatatattgtatattaataggcgtcaaaataattttagagtaagcgcttacgaaacggccgtctgatgaacgagctgtaaaaaaaacaccccggctggttgccggggtgttttggttattctgcaatcgcgtctgttaaaacaggaacgacttgtttctttctggatacgacgccttttaaaagggccgtgttgttttctaacgtcacgttgaatgctttttccacttttgacgcttgatcaccgatggcaagcgcaagggaatcattttccagaatatccgtaatcacgagaaggaacaggtcaaggttcttctcggcaattacttttgaaagagccgcttctaattccggctgccgctttttgacatcttcaatatcaactgtgttgacttgggcgatttcgacttttttgctgccgagcgtgaactctttcgcatcaagagaaatcagttcttccacagtttttttgcttaagtcggcgcccgctttcagcatgtttaagccgtactcttccgcatctacgccggcaatttcagcaagctcttttgccgctgcgatatcttgctccgtgcaagtcggagatttaaataacagagagtcggaaatgattgctgacagcatgaggcccgcaatttctttctcgattttcacgttattttctttgtacattttgtttaagatcgtagccgtacagccgaccggctcagcacggtagtaaagaggttccgctgtttcgaagttggcgatacggtggtggtcgatcacttcaagaacctgaacgtcttcgatatctttgatgctttgctggcgttcattgtggtcaacaaggatgacgccgtttacttcgtttgcggctgtttccaccaaacgcgggctttcctgcttgaaataatcaagcgcgtattgtgtttcgccgttgacttgtccaaggcggacgggctcagcattgaagccgagtttattttttagatcagcgtaggcaatggcagagcaaatggtatctgtgtctgggttttgatgtccgaaaataagaattttttccataataactccttgtccttttttgtagtgtaaacaatctttttatagtttaacacgtcttgcggagggtgtaatcttcaaaaccttaaaaattgatgtgaaaaagaagcatttttgttgagcggtgaggaggattgcgagtaaaatactgggtaagtcagatgctaatcagcatatagtatcaaaaaaggtactatggaggatgaaaaatgaacatatatccgaataaagaaggttgtccggttgaactgacgctttccgttatcggcggaaagtggaagggtattttgttttatcatatgatcggcggaaaaaagcggtttaatgagtttcggcgcatttgccccagcattacgcagcgtatgctgacgcttcagcttcgcgagcttgaggcggacggcatcgtgcatcgcgaggtatatcagcaggtgcctccaaaggtggagtattctcttaccgaattcggcaggtcgctggaaccgatcgttttgcaaatgaagaaatggggagatgccaaccgggagtttctcgagacataccgggaaaaaacgtcgcctcaagatcagtccgctcaaaaataagaagcagcaaaggattaaattccttgctgcttttttttatttcatcgcgatggcttttctggcgttgcgcacatcattcttcagcaattcgctcaggttgtaagccggatattgaccgcgttcttccatatactcaaagaccatttgatgccacttgatggccgcgtttaagtgcttgacgaaaacgtgtctcaattggggtgtggccgtctctgtaatggctccggcgtaattgcgcacagacgttttggccatgctcagcagaccgccgctgtaaaacgcggaatcagcgcgctcttctgtttcatcctcacgaaaagcgggagcttcagggaagaaaggaagcagttcacgcagattttgttccagcgaatggatggaaaatcggtaaagctgttttaatctggcatcgcttacgtcccgctctgttctttttaatttcacaagtccgtttgcctggaaagccactaactcatgcagttctaacgtttcatgccatgctaatgttctccgctcggtcatagtgtaagaatctcctttatccttcattttcactttcagcatatgccccggtcccgatgttgttcctgatgttttgaagtttccagaaagggaaactcaatgtaaaggaaatacgaaatagaggtgaaactatatgtgggacatgataaagaacttcttccttttcagcagcggggttttacaggcgaccactctcttacttatcgttatcgtcttgttatatgtacgaaaaaccaaaaagaaaaacagagaaacttctggttttatggatgatcaggatcactgatacaacgggcattctttcacggggatgtccgtttgtctgttttcatgtttcacatggaacattgcggctgtccgcgctcattttacttgcgatttcgacttatgttaaaatatatacgtgtattttggagagtttatggaaaattcaggtcttgaaagagacattgcggcgtcaaaagagcagtcgtctaagctgctcttttctattcgtatgttcgaatgatacaaggtttgaggtgagtaagtgaaaaatacaagggctctaatagaaggcgccattttgatcagtatttttgcaatcatttcccttttggtcgtgtacctccctttactgggggcaattcttctctttgctttgccgctgccgatcattctttacaccattcggcacggtctgaagcccggggtatggatggggcttgccagccttcctgtcagctttattgtaggttcgtttaccgggcttacaggcgcttttacggcggcctgtacgggaatcgccatgggatattattttaaaaagaaacagcccggctatgcggttgctgccggcgctatggcgtatgtgctgtgcggcgtcgttttttttgtggtcagcatcgtgtttcttaatatgaatgtgatcgataccaccatgtcccagcttcgggagtcgatgtctttagcagaaaccatgtcaaagcagctcggttacggagatcagttcgggaagcagatcaagctgatggaaagtcagctgagcacggttcaatatctttttccgacagtgctcgtattgaccggcatcgttttttctttcctcagttatgctatggcaaggccgcttttacggcgattttcccctgatcttccgaagatgaagccttttagagagctcaaactcccgcaaagcgttgtcattctgtattttattgtgacgatattagggtttctgcctttagaaaaagggcatatgctgtattcggtttcattgaatgggggatttattctcagcttgctgatttgtattcaagggttagcgtttatttttttctattgccgcgaaatggagatgccgaaagccgttcctgttttagcaattgtgctgggtgtgctttttccgctcatcttgtccgtgtatctcctcttaggcatcattgacataggctttaacataagaaataaggtgacgcgaaattgagtgtgacttacaggtggggagttgatagaaatgcctagtttttatgaaaaaccgttgtttcggtatcccatctatgcattgattgcattgtcaatcatcataatcctcatcagcatttactttaactggctgataggagccatcggcgttgtgctgctcgccgtgatcctgtttttcattaagcgtgcggattctctgatcagaaaagaaattgacgattatatctccacgttatcgtatagattgaaaaaagtaggcgaagaggcattaatggaaatgcctatcgggattatgctgtttaatgatcaatattacattgagtgggcgaatccgtttttgtcttcctgttttaatgaaagtacgctcgtcgggcgctcgctgtatgacacatgcgaggccgtcgtgccgctgatcaagcaggaggtcgattcggaaacgatcaccttgaatgagcggaagtttaaagtagtgattaaaagagatgagcggctgctctatttctttgatgtgacagaacagattcagattgaaaagcagtatgaaaatgagagaaccgtgctggcatatatctttttagataactatgatgacgtcacacaggggctggatgaccaaacgagaagcacgatgaacagccaggtcacctcattattaaatgcgtgggcgcaggagtacggcattttcctgaaacggacgtcctcggagcggtttatcgcggtgttaaatgaacacattttaacggagcttgaaaacgcgaaattttcgattttggatgaaatccgtgaaaaaacatccgttcacactgtatctttgaccctcagcatcgggatcggcgcatcggtttcttccttgaaggagcttggagatctggcgcagtccagcctcgatttggctctcggccgcggaggcgaccaagtggccatcaaaatgccgaacggcaaggtgaaattttacggcggcaaaacaaatccgatggagaaacgcacaagggtgcgcgcccgggtgatttctcacgcgctcaaggagattgtctcagaaagcagcaatgtcattatcatggggcacaaatttcctgatatggacgcagtcggagccgcaatcggaatattgaaggtggcgcaggccaacggcaaagaaggctacatcgtcattgatccgaaccagatcggatcaagcgttcagcgcctgattgaagaaattaaaaaatatgaagagctgtggtcgcggttcatcacaccggaagaggcgatggagatttcaaatgacgacacgctgcttgtcgtcgttgatacacataaaccgtcccttgtgatggaagagcgtctcatgaacaaaatcgagcacatcgttgtgattgaccaccaccgcagaggcgaggaatttattaaagacccgctgctcgtttatatggagccatacgcttcatccaccgcagaactcgtgacggagctgcttgaataccagccgaagcggctcaaaatcaatatgattgaagcgacggccctgttagctggtataatagtggatacgaagagtttttcccttcgcacgggctcgcggacgttcgacgccgcttcttatttgagagcgaaaggcgcagatacggttctggtgcagaaagttctcaaagaatccgtcggttcttatatcaagcgggcgaaactgatccagcatacagctctttataaagaacatatcgcgattgcttctcttcctgagaacgaagaggagtactttgaccaggtgctgattgcgcaggcggctgattccctcttatcgatgagtgaagtggaagcttcatttgcggtagccagacgggatgagcatacggtgtgcatcagtgcgagatcgctgggcgaggtcaatgtgcagattattatggaggcgctggatggcggagggcatttaaccaatgcggcaacccagttatcgggcatttctgtctcagaagcgctcgtccggctgaaggaagccattgatgaatattttgagggaggcgttcagagatgaaggttattttcttacaagatgtaaaaggtaaaggaaaaaaaggcgaaatgaaaaacgtagcagacggttatgcacataactttctcattaaaaaaggcctcgctgtcgaagcaaatgcgacaaacatcagcgcattgaaaggacagaaagaaaaagagaaaaaagaagcgattgccgagcttgaaagagcgaaagatttgaaagaaacgcttgaacagctgactgttgagctgagtgccaaatccggtgaaggcggccgccttttcgggtctgtcacaagcaagcagattgcagaagcgctgcaaaaaacgcataagattaaagtggataaacggaaactggagctccaagacggtatccgcacactgggatatacaaacgttcctgtaaagctgcaccctgaagttcaggctgtgctgaaggttcacgtaaaagaagaagcgtaatacacaatgaaaaacccgccgatccggcgggtttttttcatgtcagcagacggcgcagcgcaagaaaatgatgagattgtttcatttccgatcgttaccagattgcatattatattacatcataacgaaggatgtgtcggtatgaaacgatttttttctgaaacatattttaataatccggagaataaaaaggcgctggagcattatccgctgatcggagacggaaaagacggggaagtctaccgcttaacacacaacaaatgcataaaatacttctttgaaaaagggacatgcaagaaggaattggcggctttaaagaccggacaaggttccccggtgattccaagactgtatgaatacggagatcgttatattgtgatggaatacgtccaaggcacctctcttgcccgccatatcagaaaagaaaaatccctgtccgtcaaaatgactgctgatattttaaatatgctggatgaattaaaaagaatcggttttaccagatgggatgccgaaatcaggcacattctgatcaatgaacacggaaatcttaaagtcatcgaccataaaagagctttttccgctattacccggtttcccgtaaaactattaaaaggactggacaaatacggcttggcggatgagtttttgaatactataaaaaaattaaatccgtcacgttacctggaatggcagccgcacatgtaagtttctgaaaatccgcacatgtaagtttcctttttttagggtcgtcatatgatatttgtaacatttgtttggtggagtgtggaaaaaatggcagaatacattatggttatcggcgctcatcccgatgatgaactattgggagcagcgggcaccataaaacggctgatcaatgaaggatataaagtgatttccattattacggcattaggaagaaaagaagaagctcatcatattaaacaattaggcgaacgcgcgaatcaagagcttggaattgagaaagtcatctttttggagcatacgaatttagagctggaatgtatccctcttcataagcttgtcaaagaattagagcagctcattcgcgtctatcagcctgataaaatctttacacatcattacggcgatatcaatatggaccaccagagaacattccaagcagttttaacagccgccagaccgcttccgaatcaaaaacctatcgaactgcttacgttcgaaacgctatcttcaagcgagtgggagaggaatacggctgataaactcttcaaacctaattacttcgttaacatcacagacacaatggatgctaaactcgcggcgcttcaccactatgacgtagaaatgagggattaccctcatccccgttcatatgaaggcgttaaacatttaggaaaagtcagagggatgacggcgggtgtggaatacgccgaagcttttgaagtcgtgcggaggatctggaaatgatcaagacattttccgtcccgtatccgtatatggtccagacgcttgaccgctactacggggtcaaaacgcgccctcaaaaaaaggcggcagtaaagacacagttgaaacatgaacatcatattccgcggttatacaggaaaaaaaagaagttatccattttgattgccacgttttgggactacccgcacacgggcggtttatcaaactatattaaaacgcttagtgaaggcctgaagaagaggggtcataaggtggatgtcatctcccctaatctgtttccgtccgcacaggtaaaagaactgcgggcggctgttgttccgaagttaaaagatttctttaaggacagatatggggattataacaatcatattttgaaaaataatcggctgatgtttatatacgagcaaatgcttcaaaagattcatttggaaagatatgatgtgtttcatgctcaagatttatttacagccaatatattaggcagattcaatcaaatctataagaaacctttatttttcacaccgcatggcatgtttactttcaacagacttaaatttcacatctttaaaaaaggatcgatagaagagttttattataaaaaactagagatgaaagccattgaatacgcagatcgcctgattattatcagcgatacgttccgcagcccgctcatgaagctcggagccgaacaggaagacatgacaacggtgatcacaggaatcgattacgatgcaaaaacaggcgggaaaagaaaaatcccgctgccgaaaaataagatcatcatctcgtgtattgcaagattaggcccgagaaaaggacataatcatttgcttgacgcactttcacgaattccgtctgatgtacttgagcatgttgaagtgctgatcgcgggcgacggagagatgaggagcgccttagaggaacaggctcgaaaactgaatctatctatggtttcctttttaggaaaaagagatgatgttcccgctattttgaatatgacggacatattcgtactgccgaccgttaatgacagtctgcctatttcgattattgaagcgatgttcagcggctcggctatcatcgcgaccgattgcgggggtattccggatctgatccgccataacaaaacggggcttattgtcgagccgggaaatgcaaaggttcttgcccgggctttagcgttttttatcactaacaaatctgcgcggaagatagctgcttcaaacgcaaaggcctacgcggagaaatatttgagcagtgagacgatgataaaaaatatcgaatcgatttatcaaaataccaacagctcggagggagatcatgaaacatgaacatgcagccgttgtactagatttcagtgcaaacgggattgggatcattcgcagcctggcccgaagaggaatcgatgtttacgcatttgacacggagggaccttatcgtatcggaaaatcaagattggcagattgcgggatatgtcccagccctttaacacaagaggaagaactgctgacattcctgactgatttcgggaagcgattccaagcaaagccggttctgtatgcaggttctgatgattatgcgggatttatatctaaattccgcgagacattagccggtttttttttatttttgctcccgagccgctctctgttagaaacggtcttagataaaagcaaagcatatgaattagcggtcaagcataacatcccctgcccgaaaaccttttttccgaacaaccgggatgagctggaagaggccatcgccaatattgacttcccgtgtattttaaaaccggtggccggccatgaatacagaaaaaaagtaaacaaaaaagcaattgtaatgaaggatgccgcacaattgcgcaaggagttcagctcctacagagaaaatggagaactgctcgtgcaggagatcatccccggagacaaccagtgtttttataaagtcgccactttttatgatgaccaaatgaaattaatgggcttattctctctgcaaaagaaccatcaattccctgctgattttggcgcgggggcccacgtcgtcagcaaacggcttcctgatttaatcgagaagaccctgccgttttttgaagcgattcagctgaagggagtaggcatggcagaatttaaaaaggacccccgggacaatgtttataagtttatcgaaattaatccgcgcttttggctcagccatagcctgacagaaccggcaggcattcatttcgtttacatgtactatctgtatttgaccggacaacatgtgaagccccagctcgaacaaaaagacggaatcaactggatttatgaggtgcgttacttcttaacgtttttgaagaaacgaaaaagaggagaaatgacgttccgggatttttggaaaggatttaaaggaaaaaaagagtacgctctgtttgcttggaatgacccgatgccatttatcagaaacacttggtctcatctcaaaaacagctggaaacggaagcggaaggaagatcggcatgtatgaaaaggatcttttgtatgacgcatttcaaaaactgagaattgacgaaaaactgtcgtattcgttcggtgaaagggccgcggtgaatccggatgacatcacatgcctgaaatcaacagacagaagcgccatttataaactgtttgtaaagaaaaaatccggaattgttccgctgatattgaaggtgtataaatcttcacgtgaaaaaaacaaggtcgagattaatatatacgggaaagcccgttctgttttaggggatttgctgccggacatctatcttatagaggaaagtgaccatgaaacgtggatatttatggagtttgtcagccagatcagaggacagcttacatttcatccgaagcatttcaagtatattattccgtctgtcgcagaactgcacagccgcacctttgaaaacaaggctgtttctgacggtaaatggcggtcgtggctgccgctatacgaatcggaaaccatgagaaaagggcgtaaaaagcagatcaaaaagacagcggaattattggatagagctcttaaagatgagcgcacaaaggatatcgtgaagcctcattatcggcaaatcacaaacttgctggagcaggaggagccgggttttttccctgaattggtccaaaacggctcagccatcacacacggtgatcttcatatgcagaatatctgcacccacgatgcgtccggacatgaaccgtgggatattcaattcatcgattgggaatccgcaaagtacgcgccggtttggtttgatatgacggtgctggtcgaaattctgctcggcttcagaaaagactggagccggcacgcagaagatattcggacgtattgcgtaaaagtgtatacgaaagaaatgaaaaagcggggcattcattttcagacccctcctatgacgctttataaaatggcttatttgcagagaacacttgagaaagggcttcatacccaattgcggagaatcttcgacaatcggggaggagaactgctgccgtatcatgttgacaaagtgtcaaaatggggacgggaattaggattataagtttaagagagggggagcggatttgaaaggagagatcggcaagccgaacggtctggtgcctctaaccttattgcgcgtcatggatcaattttacgggatcgaacatcaaagtgagccggagatgctgtattcgttctgtgcggaaggaaaaagctcccccaaacgaaaaaagccattgcgtattctgtacgcaacctttctccgttacccgaatgtcggaggactggcgagttatatcacgtcaattaagacgggttttgagcgcatcggtcaccaggcggatgtcatctcgccgctccaaatgccgccaactttttttcaggaagatatcccgcgggccgctgacgagatcagagcgtttcttgttggcagatacggggccgcaaacgaaaagtttgtgaagaatctcagctatttacatgtctttcaaagatttttgaaggagaaggacttagaacaatatgacctgtttcacgcgcaggatttatttgcggcatttttgctgggataccttaatcaaacgtatcggcatccgcttttttttacgccgcacggacatttcacgaaaagccggatgaagtttcataaaatccaaaagggttcaatagaagaggcatatttcagtgaaatagaaaggcagggtattcgggcttcggataaaatcattacaatcagcgactcctttcacgagcccttgctggagtacggagcgaaggaggctcagctgacgactgttcataccggcattgacatccgggttgcacccgagccaaaacgtgctgaaaaggtcgtgattgcgtgcgtttcccgtctgaccgagcgaaaaggacatgatgtgctgctggacgctctcgcccgcatccggcaccatttatccggagtggatatatggatcatcggggacggaaacatgagagggtttctggaagagaagagacggaaactgggcctctcaaacgtgtttttcctcggaaaacgacatgatgtgccggcgcttttggctgaatcatctatatttgtcctgccgacattgaatgataatttccccatagcgatcatcgaagcgatgttctcaggtcaagccattgtcgcaactgactgcggaggaatccctgagatgatccggcacgaggacacagggcttatctgtcagcccggcaacagccgcgaacttgctgatgccctcgtaaagctgattacggatcagtctctcagggaacggcttggaaaagaagcgcgctcctatgccggccggcatctgcgtcaggaactgatggtttcaaaaatagaaaggatttatcaatcatttttctgaatgataccggcgccgcatggcaggtgcttcaagagcaaaataaagaggccggtgtttaactatccagcctctttccgagctgttttttcatctcatacagagtctgctgactttgtccgcccgggccgcctgtcattcctcatcgggctgagcctgtttttccggtgctgtatcggtcagctgagatttttgtgccgttctttttaatccatgagacaagctttgtgttgcctgaattgtttccggataataagaaatagttcacttttccttcgtcaacaagttttttcagctgtgagacggttttaccgaaattttcttcatggaaaaaagaggcggaaagccatcgcttccgcctcccgcacatatatatgagagagcagcctttatttgtgatcgttctctttttggatttcagctaatttggcaagcagaatgtgctgaggcatgtgcatgattctctcaagcggcatattcagtgattctgcgagcttttgcgccgtttcggcggaaatttgcagcggtttcatgtgatcactccttccgtttctttattgtactaaaatcagaaatctatcgtaagaggatatgacaaaggaatggaggtttgaaaagcggggctttataacagaatgggggaggttttttatgcaatcgccattgatgttattacagctgaagctggctgattatcagaaaaaagccgcagaactgcggacaattgacgaatttatcatactgaaacagacattgcaggacatgatgaaagtattcgccgcctttgaagaatgggagctgtatcaaaaaacggccgatctcatggcgcagacggtgctgcacatccgtttcatcgaataagaaaagccctcgcacgggcgaaggcttttcttaaaaggaacgttcctcttcaatgtttttatgctgatcataaatgacaagcttagccgggctgttctctttcgccatctgctccgctttttcaatcgccgcgtcctttgatgtacaaagagccgtcggcgccacattttccaccttcacaaaccatccgtccgcatcaacactgggtgttactgcatatgttttcatccttcttacctcccggtttcgatttatttatttgtttcccggcattcggaacggtaaaacacataaccctctcctgacaaatacagggaaagtgatatttttctattctttttcatgagaaatggtaaaatgaaatttggatattttttaaggaaaggacggtgcttagcatgacagaccttctgaatgatcggctgccgccgcaaaacatagaagctgagcaggccgtgttaggtgctgtttttttacagccgtctgcgttgacactggcttctgaagtgttgattccggatgatttctacagaatgtcacatcaaaaaatttacaatgccatgctcgtgctcggagaccgcggtgaaccggttgatttggtcacggtaacgtcagagcttgcgaataccgatttgttagaagaggtgggaggcgtctcttacctgacggacatcgcgaattccgttccgacagcggctaatatagaatattacgcgaaaatcgttgaggaaaaatccattctccgccgtttaatcagaacggcgacctcgatcgctcaagacgggtatacgcgcgaggatgaagttgaagatttattaagcgatgcggaaaaaacgattatggaggtcgcgcagcgaaaaaattcgggcgccttccaaaatattaaagacgtgcttgttcaaacatatgacaacattgagcagcttcacaaccggaaaggcgatattaccgggattccgaccggctttatcgagcttgaccggatgacggcgggttttcagcggaatgatttgatcattgtcgcagcccgtccgtctgtggggaaaacggcgtttgccttaaatattgcgcaaaacgtggccaccaaaacggatgagagcgtggcgatattcagtcttgagatgggtgccgagcagcttgtcatgcgtatgctctgcgccgaagggaatattaacgcccaaaatctcagaacgggtaatctgacggaagaagattggggcaagctgacgatggcgatgggaagcctgtcaaacagcggtatctttatagatgacacccccggcatccgcgtcagcgaaatccgttcaaaatgccgccggctgaagcaggagaacggattgggcatgattttaattgactacctgcagctcattcagggaagcggccgttcgagcgacaaccgtcagcaagaggtatcggaaatttcacgggcgctaaaagcgctggcgcgggagctcgaagtcccggtcatcgccctgtctcagctctcccggggtgttgagcagcggcaggataaacgtccgatgatgtcagatatccgtgagtcgggaagtattgagcaggatgccgacatcgtcgccttcctgtatcgtgatgattactatgataaagaatccgaaaacaaaaacatcatcgaaatcattatcgccaaacagcgtaacggcccggtgggcaccgtctcactggcttttgtgaaagaatacaataagttcgtaaatctggaaaggcgctttgatgacggcggtgttccggcaggtgcgtaaagcctcaagcaatgtcttgaggctttttttcatccgaaagaatgagagaatgccgtctgttcggcagtcgataaaaagaaagcgcttttatataatggcattaagggagggatgatgatgacaattgaatttccgcaatttcaagcggcgcaaatccggattgcccggccgaccggacagctcaaagaaatcatcaggttttatgaagaaggcctcggattgaagagggtcggcagtttttccggacatgagggctacagcggcgtcatgttcggcctgccgcatacgcaatatcacttagaattcaccgaagaaaccggctcgtctcagccggcgcccgttccgcacggcgacagcctgcttgtcttttacatccctgatcagcaggaggtcattcgcatcagcacgaaattaaagcagatgggatatgaggagaaagaacccgaaaacccgtactgggaagaaaaaggcgtgaccatcgaagatcctgacggctggcggatcgtcctgatgaatacaagcggaatataaatgactgtctgaagaacccgggatatgggttctttttcgtgttaaagtatgaaagtttcgggagtaatagatagcaaatgaaagagaaaacgcttttaatcaggtttaaggcgaacaaatatagaataataagattttaatgttcggatttacgattgactttctgtttcggcactgatacacttaatttgtttgaatgagatatcgttttgaaaggttaacggaggtgcacggatatatgtcttcagtagtcgtagtaggtacgcagtggggcgatgaaggaaaaggtaaaattacagatttcctatcagaaaatgcagaagtgatcgcacgttatcaaggcggaaacaatgcaggacataccatcaagtttgatggcgtcacgtacaagcttcatttaatcccatcaggaattttttataaagaaaaagcgtgtgtcatcgggaacggaatggttgttgatccgaaagcgctcgtaacggagcttgcgtatcttcatgaacgcaatgtgagcacggataacttgagaatcagcaacagagcccacgtcattcttccataccatctgaaactggatgaagtagaggaagaacgcaaaggggccaacaagatcggcacaacgaaaaaaggcatcggacctgcttatatggacaaagcggcgcggatcggcatccggatcgcagacctgctagatcgtgacgtgtttgcagaaaagcttgaacggaaccttgaagagaaaaaccgtctgctggaaaaaatgtatgaaacggaaggcttcaaaattgaagatattctggatgagtattatgaatacggccagcagattaaaaagtatgtatgcgatacatccgtcgttctgaatgacgcgctggatgaaggccgccgcgttttatttgaaggcgctcaaggggttatgcttgatattgaccaagggacatacccgtttgtcacttcatccaacccggtcgccggaggggtgacgatcggttcaggcgtaggtccgacaaaaatccagcacgtcgtcggtgtatctaaagcgtacacaacccgtgtcggtgacggtcctttcccgactgagctgaaagatgaaatcggggatcaaatccgtgaagtcggacgcgaatacggcacaacaacaggccgtccgcgccgtgtcggctggtttgacagcgttgttgtccgccatgcccgccgtgtcagcggaatcacagatctttctctgaactcaatcgatgtgctgactggcattgaaacattgaaaatctgtgtcgcttaccgctacaaaggtgaagtgattgaagaattcccggcaagtctgaaagctctcgcagagtgtgaaccggtatatgaagaaatgcctggctggacggaagatatcacaggcgcaaaaacattaagcgatcttcctgaaaatgcgcgccattatctggaacgcgtatctcagctgacaggtattccgctttctattttctctgtcggtcctgaccgttcacaaacgaacgtcatccgcagtgtataccgcgctaactaagaatttgcagcaaacaagcctccggtcacggaggcttgtttttttatgtaggaaaaaaataatagattttttttcaaaaaagtagttgccactttcgaatgttctatgatattataaatctcgttgttacggaacagcttcaatagagtactgcaagaaagcttttgtctcaatgctctatgatacataatccgacacatcaagagccattagctcagttggtagagcatctgacttttaatcagagggtcgaaggttcgagtccttcatggctcaccactttttatggcccgttggtcaagcggttaagacaccgccctttcacggcggtaacacgggttcgaatcccgtacgggtcattgatttactttagcgttattgctaactccttatttgtcctcggagggccgccacgatacggttctccggacaaattactgtaaggtccggtagttcagttggttagaatgcctgcctgtcacgcaggaggtcgcgggttcgagtcccgtccggaccgccattttactttactttatagtatagaaaagaaacatctggctcggtagctcagttggtagagcaacggactgaaaatccgtgtgtcggcggttcgattccgtcccgagccacttacccaaacgcatctgcaatagtaggtgcgttttttcttttgttataaaaaagggagagccggcttttcagccggcccagaagaagacgtcaaacactagacggcgttttttttcttaaggtttcaaaaaaatattattttttaaaagaaaataaaaaacatgacaaaaggatggcagttcaatacgtttttgcgctgttctctttaatttttttatcttttgacctgaaaccgttataatagacggggaacgtttttcacgatacgaattgtgatcatcatgaaacatcaatagatgaaatgaagtcattctggcaggaggaaaatcaagatgatggataagaaaatccttgtagtcgatgatgaaaaaccgattgcagatatattagagtttaatttaagaaaagaaggctatgacgtgcattgtgcgtacgatggaaacgaagccgtggaaatggtggaggagcttcagcctgatttaattcttttagatattatgcttccgaataaagacggagttgaagtgtgccgggaagtccggaaaaaatatgatatgccgattattatgctgacggcaaaagactcggagattgacaaggtcatcgggcttgaaatcggagcggatgactatgtcacgaagcctttcagcacgcgtgagcttctggcccgcgtcaaagcgaacctgcgccgccagcttacggttgcgccggctgaggaagaatcagcttctaatgacattcatatcggttctctcgtcattttccctgacgcttatgtcgtatcaaaaagagaagaaacgatcgagctgactcatcgtgagtttgaattgcttcattacttagccaaacatatcggacaggtcatgacccgtgagcatctgttgcagactgtgtggggctatgactatttcggtgacgtgagaacggtggatgtaacagtgcgccgtctccgtgagaaaatcgaggataatccgagccatccgaactggatcgtcacaagacggggtgtcggttattacttgagaaatcctgaacaggactaaccggcgatgaataaggttggtttttttcggtcgattcagtttaagatcacgctgatctatgtgcttctcattatcatcgccatgcagattatcggcgtgtactttgtgaaacaggtggagaattctcttctcaagtcctatgaattatcgttaaatcagcggattgacaatctatcctattatattgagcaggaatataaaggagataatgacagcaccgtcattaaagatgacgtcaaacggattttgaatgattttacgaaaaacaatgaaatacgggagattacatttgttgataaaagctatgaggtcgtcggttcttcgaggccttatggcgaggaaatagcggggaaacagacgactgacccgatttttaaacggattttctcaacaaaacaggcctattcaaaaaaatattatgatcctaaaagcaaaaacagagtgctgatttcagcaaaacctgtcgtcacagagaatcaggaagttgtcggcgcgatttatgtcgtggccagtatggaagatacctttaaccagatgaaaaccgtcaactcgattcttgcttcaggaacaggcttagcccttgttctgacggctcttctcggtatatttctcgcccgcaccatcacccatccgctatcggatatgcgtaagcaggcgatggaactggcaaaagggaatttctccagaaaggtgcggaaatacgggcatgatgaaatcggtcagctcgcaacgacattcaaccatctgacgagagagcttgaagatgcccaagccatgacggaaggggagagaagaaagctttcttccgttatcgcgtatatgacggacggtgtcatcgctacgaatcgcaacggggctattattcttttaaacagccctgcgcttgagctgctgaatgtttcacgtgaaacggctttagagatgccgattacgtctttattgggcataaaagagaactttacatttgaggatttagtagaacagcaggattcaatgctgctggagatcgaacgtgacgatgaaacgactgtactgcgggtgaatttttccgttattcagagagagcacggaaaaatcgacggtttaatcgcggttctttatgatgtcaccgaacaggaaaaactcgatcgggaacgcagagagttcgttgccaacgtgtctcatgagctgcggacaccgctgacgaccatgcgaagctatttagaggcgcttgcagagggcgcgtgggaaaacaaagatatcgctccgcgtttcttaatggtgacccaaaatgagactgagcgcatgatcagattggtgaacgacctgcttcagctttctaaattcgacagcaaagattatcagtttaatcgggagtggattcatatgatccgctttatgtcactgattatcgatcgttttgaaatgacgaaagaacagcatgttgaatttatccgcgagcttccggacagaaatctgtacgtggagattgatcaggataaagtgacgcaggttctcgataatatcatttctaacgcactgaaatactcaccggaaggcgggcatgtcactttctcagtcgatgtgaacgagaaagaagagctgctttatatcagcgtaaaagatgaaggtatcggcattccgaaaaaagatgtggaaaaagtctttgaccgtttctacagagtggataaagcgcgcacgagaaaactcggcggcaccgggctcggccttgcgattgcaaaagagatggttcaggcgcacggcggagacatttgggccgacagtgtagaaggcaaaggaacgaagattacatttactcttccatataaagaagagcaagaggatgattgggatgaggcgtgaaaatataaaaacagtcatactgtcagtgctggtcgtcattagtcttgttttaacatggggaatttggacattccagcccaatttttcagaaggcacggcctcaaccaaatcgactgtccgggaaaagcataaaattgataaaacgagccaaaaagtgtcgcaaacggtaaaaccccgggatatgtttattcatacaaacggctctcattataaagtggatgatgagacgctctttaatgacctgtgggcggatttgccgcaatgggaagtaaaagggatgaaggatatttccgatcaatacgacaagctcggttttaaaaattggctttacggcagaaacggcaattcggcaaagctcgatctgcaattcaatgacaccattccgattgatttcttccaatcgatgtttaaatggtcaaatccgtcaatggaatacagctcatttgaccatattgttattccgtttaatgagaataagacgaataagaagatttacatggtctcgtacagcaagcagctgattttggaagtgactgtggaatcggcgaattaccgcaatctgatgaatgagctgtacagcaaaaagtcgagtatgccgttataccacctctattcggtcggaaaaagcaaagaatttctcatgccgaatgcgcggtttaatatgaaggaaaaagaatttatcactgaaaccattaagacgaacctgtttaagcagacgctttttaatgatccgagcacggtcagagaggacccgaattacaatcggaatgtgctgactgacggaatcagccgtctggaaatcaattcgacacagcggcagattcaattccagcatcggaatttggcacaaagcgcttcttaccaaacgggtgagctgattaagaaaagctataaatatttagaggatacgggaagctggacggatcattatcaatttttcaatgtgagtgataaccagcagctgagtttctacatgtttaaagaccaaatgcctgtgatcaacagcacgtctaagcctttcggatccggacctgttttgaccctgcaatgggccaatgacgaggttctcagctacaagcggccgaactatgttctcgggccgaatccgattaaaacaaaagacgtaaaaatgatgaacggcaatgaggttgtgtctctgctggagcagcaggataaatacgacgtgaacaaaatcgaccagatcttcctgtcctatcaaatggtctcttcttcaacgaatgatctcgttgaactggaacccgtctggagtatgaagatcaacgggaagatcgtcccgattacgaaagatctgctggggaaggaggaggacgataatggagtggaataagacaaaaacgatcttcatcattgccttcctcatcctcgatatttttctcggctatcagttttttgaaaaacgctcgagcagtgaatacgaagtgattaaaaattcaaacgtggaaaaagacatggagatggaccatatcacattcggcaacctgtcttctgattccgcgacgggctaccggctgacggcgggccaaaaggtatttaccgctgaagatattgatgctttgaaggatcaaaagccgttaatggaaatgccggcggatgatcataaggtcacaacgctgaaaatgaaatttaccgatccggtcggtttatcgaagcaaaaaccgcaggaggatgcggaatcgctcgtcagttctaaagtaaccggcggtgaaaaatataaactgtggaaagtcgacaaggatcaaaaacagatcattttttaccagacatatgacggacagtttatttatcaggattttgactcgtccacggatgcgatcggacaggtgattctgcatctgaacgataaaaaccaggtcgtatcctacgagcagaccatgctggagtcattcaagcgaatccagaccgagagcctgattcctgagcttgatgcggtcgaattattgtattctcaaaattacttaaaagcgaattgcgccgttaaaagcgtcaagttcggctatattgcccaatacccgctgacaagtacgcaggtgctggcgccggtatggagaattacaattgaagataagtcaaaagggacgaagaaaaagacacagcaaacgtacactgtgaatgcattggaaagcacagtcattgataacaatcaaaataaataatggagtgagacacaatgggcttgcaatttagcgtgcttgcgagcgggagtaccggaaacgcgttttatctggagacagaggagcattcttttctggtggatgccggcctgagcggtaaagcgatggacgggctgatggagagaatcggccgcaagatagacgacgtcgacggcatctttgtcactcacgagcacagcgaccatattaaagggctcggcgtaattgcgagaaagtacggtctacccgtctacgccaatgaaaagacgtggaaagcgatggagaatcagatcggcaagcttgataccggacaaaagtttttgttcccgatggaaagcgtaaagtctttcggcgggcttgatgttgagtcattcggcgtctctcatgacgcggccgagccgatgttttatgttttccactaccaaggcagaaagctcgcgctgatgacggacaccggatatgtgagcgacagaatgaaaggcatcatccgttcggccaatgtgtttgtgtttgaaagcaaccatgacgtcggcatgctgcaaatgggcagatacccttggagcattaagcggcggattttaagcgatgtcggccacgtctcgaatgaagatgcggcgctcgccatgactgatgtcatcggcgacggcacatcgcgcatctatttggcgcatctgagccaagacaacaatatgaaggaactggcgagaatgtccgtgcagcagacattggctgcgaaaggatttgtcgccggggaaacgtttcagttatttgataccgatccgaaaattccgacgccgctgtgcgccgtgtaatttttccaaatgaatcatgattattaatccgcgatctgacccacactataagcaaatcgagtactcttgaaaggatttgagatagggtggattataatcgcgatgatgaacagtacgcctccgaacagccccgccgcagcaagagaggatactttctatcaagtctgatcggcgtcatcgtcggggccgcgctcatggctttcctgatgccgtactggacaggcggagaccatggagacagcagcaaaagcaccagccggcgtctcggcagcgaacaggtgaaaacagtcaacgtaaatgtcaatgacgctgtcacgaatatggtcagccgtgtatcggattcggtagtcggcgttctcaatatccaaaagactgatatttggggagagggcggcgaagcgggaagcgggtcgggcgtcatttacaaaaagaacggaaacacttcttatatcgtaaccaatcaccatgtcattgaaggtgcgactgagattgagatcagcctgaaggatggttcgcgcgtgcctgctgagctgatcgggagcgaccgtctgatggatctcgcggtactgaaggtgaagtctgataaaatcaaatcggccgcccagttcggcaattctgatcaagtcaaagtcggagaaccggtcattgcgatcggaaatccgctcggacttgaatttgcgggatcagtgacacaggggatcatttcaggcacggaaagagcggtgcccgttgactcaaacggcgacggacatccggattggaatgcggaagtgctgcagaccgacgccgcgattaatcccggcaacagcggcggcgctttgatggatatttcgggcaaggtggtcggcatcaactcaatgaagatcgctgaatccgccgttgaaggaatcggcctgtccatcccgtcaaagcttgtcattcccgttattcaggatttagaaaaatacggagaagtccgacggcctttcctcggtattgagatgaaatccttaacggatattgcgagctaccattggagccagacgctgaaacttccgaaaggcgttaaaaccggggcggtcattatgggtgtcgacgcgttttcaccggccggaaaagcgggtttgaaaaagctcgacgtgattaccgggttcgacggacataaggtcaatgacgttgtggatctccgtgagcgcctgtatcgcaaaaagatcggcgaccgtgtgaacatcacgttctaccgttcgggaaagaaaaaaacagcggaagtcaaactgacagaagcagatcgattacagaaataaaaaagcagcccggacatccgggctgttttttattgatttatttgttaatattatactattgtgaagcagggaggtgaaacacatgaaaacggctgatgtgatcatcgtattgaatgaaatcgagggtgaatgtgaaggaagaattattttagaatgcagaatttaagaaaatgaaacatgtcatattaaacgtcctttttcaggggcgcttttttttatgccttttttcagaagctataaaaaagaactgaacgcgggtcacaacacgttcagttgaaaatggatatatgtagaaaaaggcagacatgaccttagaactttgtgattgaaacagactggtgctgctgaatagcggcagatgaaactgccggcagcttatttgcagatggctccgttttcagcgtttactttcaccaattcagcttagcttccgttttgtttcagataaaagcgaataatagaaggggaagcgaaaaaaataaacacaggctgatacatctaaggagagactgcatcatgaataagttgaaaggcatcaagctgctgagtgcagacggcgagtctgcactcattgattctttaacgatggggcttcatcacggaacggttctcggggaagacaatatcgtcgagacatacattcgttctttgcgcgaaaagctgaaggacaaagaacacaaggtgattcgcacggttcggggcgccgggtacagggtggacctggcatgaaacggctgtacagaaccctgcggttccagctcctgttcaggtcactggcgattttgaccttgctgttatgtttcatcggcggtacacagtacatgtttatgagacggacgatgtatgaaaatcaggcgatcagcattcagagtgatatcaattcaatggatcaaagcgtatggaggtcaatcaaaacccctgcccgttccgaaacaccggctcatccgaatgtgatttatcccggggtgacggttgcttttatcaatcaatcatacaagatgtcagttttatcagaagacccgcacgcgggagccgctccttctttcccgaaaaacgtgtatcgggatgcgctgacagatacaatggcgcttcactatcaggtggctcacaataaggcgggtgaggaaatcatcgtcgtgtttcaggcgatttccgttgacggaaggcaggcgggagttgtacagatgagcacgctgacccagcctctgaatgattcgcttttccgccagatcagcattttcgcgatactttcctttgcggctttggttatcggactgtttgtttttttgccggtgatccggctcacactcaagccgctgtcccgcattgtgcatatgatgggtgacattcatgccggcagtctcgataaacggctgccgattgataggaagcaggccgaaattgagtcattgggcatctccatcaatcagatgctggaacggattgaaaccgcgtttcaggcggaaaaagaagcgaaggagcgcatccggcggtttgtatcagacgcatcacatgagctgagaacgccgcttacctccattcacggctttatcgaaattttaatgcgcggagcggcggaaaagccggagcagaaagaaaaagcgcttcaaagcatgtacgcggaatccgtcagggcgaataagctgatagaggatcttttgtttctcgcgaagattgaccgggagccgagctttgaaatgaaaaaaggggcattgggagacgtcattttggaaatggaggctgagctgaagctgcttgcgagaaaccggaaactcgagttctttgttgatcaaaagatagaagctgtttttgacaaagacaaaatgaagcaggccattctcaatctcttttacaatgcggtgcagcatacggatgaagacacgggtgtcatcaccgtctccctgcagaaagacggaggaatcatgcttatgattgcggataacggaacgggaatcgctccggagcatgtgcctcatgtgtttgaccggttttacagggcggaaacctcccgatcccgtcaatccggcggcgcggggctgggtcttgccattacaaaaaccattatcgacagccataacggaacaattgaagtgaaaagtgagcagggaaaaggctccgtgttcatcatccggctgccgggataaaccgggatagcggaagaaatatcacaatttatatataaattctaaattttcaaaaaataacttgtccttttccaatattgatgataatatctagttattggcaaagggggtgtgtactgatgaagattgaagaacttgatcttgatacagaaacagcaagcttggtgcatcgctgctagtaaagccgtgactcccctttttggggagttattatctttcagggggtatgtcatgatgtcaacggactgtaagcgctggaagtttaaagacagcgtgcaggtgctgacctacacggggcatattatcattcaatatcgaaaggcgattaagcttgcgcatacgagtgagatcaaagaggcggttgaacggctgatcaccggctgtgaaaaacaagagctttctgatcttctgggagaggaagcgggaaaccagtttttcgatgcgttaatgaaattggatgctttaatagagccatggcaaaacggccgtgaaggctgcatcactgaaaagcagctgtaccattttgagaaatacaaccaaaaccccaatctgatccaaaacagattagacggcagcagggcagcgatcgtgggtctggggggcgtcggaacgatcattcttcaaaaccttttggcggcgggcatgcagcattttattctcattgatttcgatgccgtatcagtacataacctgaacagacaattcgtctatactcaatcttctgtaggcaaattaaagatctcagaatgcagagattatatcgcgggtatcaatccccatgcggacgcagcactttaccatcaggaaatgacacagccgcaggacctgcgtgtgttagatccgtacgaaattgatatcgtcataaatgccgctgacaaaccccataacatttctgaatgggtttatcagtattgtaaggagcggaatatcgcgtttatgaccgggggtgtcggcagcttcagcggccaatgggggcctctgctcacgcctgaatcctatcaatccggcgtcacctatgaaaaaaacatgccggccggacttctgaactgttaccccgatgaaccgatcaaaggttcgttaggagcgacaaacggtattatatcctcgtttatgtctcatgacattatcacataccttgcaggcggaagcccgaaatccctgaatacccgcatcggcctggactttgacggacttcatattacagaaacgaagctttctcaaaaggaaagcgctttatgaagacgatgcatcgtacggcgagaaaaccgggcgaccctctgaaaatagaaatcgacacaagcccgatacgcttgaacccattagatacgcaggattacacaagcaagatgatttgcagcattatgtatgaaagcctgcaggacggctataactgccgaatcatccgcaaagatcgccgcacctgtcaggtggacattcacccggactatttaggtgacgccgagggtgtggttcaaacgatcatctatcatctgacaaaagaaaaccaaagtccccatctcggcagtttcctgaacataaaacaggccgttccgtatgtaaaaggcctcgtctcatccgatcagctcggggtgaacgtaacgggcgaaaaacgctttgaagtcaccttggacgagccgtctgatgaaatagaagccgttttgcagagcagctttctgattccggcgaccgccgggggcgatgtgccggaaaatggcccgtaccgattcaagcgtacgtttgagaagggactggaatttgagcggaatccgcaatataaaatgacgcccgcggatcaccgcaccgttcagatcatccaatttattttgaatgatgatctggaaaaaagcatctggctgtacgaagcgaatcagaccgatgtgacctgccacacccagtttcatcattccaacatgaggtatcggcagtatgctgattttaaagaaaatcatttgccgatgttatttaccttcaaggtaaaggacggcatgctgagaactttcattcagcattattttgataaacaaaagctggccggcgatttggggcatatcatcacaccgactgattcactgatcggtatatgggaaagcggacggacaccgcagaaagatccgccccttttgacaaaagaagagccgatccgaattgtttatgccgattattatcccaacggagagatcattgaaaggctgactgaattgtttcggagggccggagcggacgtatccgtctcccgcgtcagtcatttcaatgattattaccatatggataaaagcgggtttgatattgagcttcatttgttcctgccggcttacatgcatgagctgagctatatcaaatatttcattcgcgacatcagcgatccggggaagaaaaaaacgatcattgatgccataggatctgaaaaaaagaaggaactttttgggttattcgagaatacaactcattattgcccaatttgttttgggaaaagtctgtatctgcaagatccatgtatagagggttttagtgtaaagactgacgggctcctttctgttcatgatgttaaatgcagatagctggaaaggggtattcatttgcggaatcgaaatttgctttacttctccggttttttcggaaacttctttttcgaacggggaatttggattttatatttaacaagcatgaattattcattgtttctagtgggcatcctgcaatcggtcctgaatttggcgatgtttctggcggaagtgccgagcggcgtcatctcggacagaatcgggagaaaaaaatcgctcttgctcggtcattttatggtcattgtctatttggtgatgttcctgagcttccataacttcatcgccctcttcatcgctcatattatatacggtatcgggctgacgtttatatcaggaacggatcacgcctttttgtttgattcactgaaagaacaagggaaagaaaagtggtacggcaaatccatcggaaattataacggacttgtcatactcggtcttgcgatcgccatgggcatcggcggctacttgcaggaaatatcatggtcgtatgtgtttatcgccgggattgtgactcagctgattgcgatggcggtcattacacagctgacggagatcaaatttgaaaacagtgaacacgaaacgcagacggtcggggacatcttaaaagaagtcaaagatttcttcaggctgaacaaagcctttaaatatttggtgctgtcactctccgttttctttgcgattacatcggttttttatatgtacggacaagatctgttaagtcaggaagggctgtccgtgcgcaatatatccattatttttgcggggctgtccatcttgcaggcactgtgctccatcttttcttcaaagccggcggaaaaattcacgccgaggcgcgtgcttctgctgacattctgcatcatcggggcggcctatctgtttataccttcgggcagtctgtacgtgacgattgcagcttttgttgtcatcaacgcgctctatgatgtgatagaacccgtatccagtcaggtggtgaataatgagattccgtccagaacgagagccacgctgctgtccattatcagtttgatgacctcgctcttcatgttcattgcctttccgtttatcggattcttaacggactattttgattcagctttgctgctgaccgcaatcggggtattatccatcttattgtcgctgtttatgatgctcagcttttacaaactgaaagcgagcgtcgccatccagaataaagtcgagctttgaaccagaatgacaaagggatgatgtgagttgctgaatattcataatcttacggtaaatttagcgggagataccattttcaaacaagtttctttcttcatcaatgaaggcgaaaaagtgcttgtggccgggccgaacggttccggcaaaagcacgctgttcagggtgctttcaggggagcttgaggcggatgaaggaacgattgcgatcaacaaaggggcgaaggtcggtttgctgaagcagatcgctgatccccatgaggatctgacgttgtatcaatatctggaaaaatcgtttgaagctctcgcggcgatccagaaggaaatgaaggccattgagctgaagctttcggaaccgatgggtgaggacgagctgactgctttattggaaaagtacagtcaatacacggaaacatttgagcggaacaacggctaccagatgcatgcgatgattgacgaggtatgcaacgggctcagcctcagcgaattaaaggatcagccgttttcaaagctgagcggcggcgaaaaaacaaaagccggccttgccgaaattttaatccgcaacgacgacattatactgctggacgagccgaccaaccatttggatgttcatgcgattgagtggcttgaagggtttattaaaaaatcgaataaaaccattctgtttacgacccacgataaaacgtttgccgaccagacggcgatgaaagtgctcgagattgacgataccgaggtgaagatttggccttacggtttcagcgaatacctgaaaaagcgggaagaattcatcatcgcccagtttgagaaatatgaagaacagcagagaaaaatacagaagatgaaggaatccatcgcccagctgagagattgggccaaccgctcgaatccgccgtctgtcgggctgcacagacgcgcgaataatatggaaaaggcgctgaaaaggatcgagctgatcaataagccggtccggacggagcaaaaattaaaaaacgcatttcaggaagcgggcgccggttcaaaagatattgtgttcattgaaaacggaaaggtggccaacggatcttcccttttatatcaaaatgtgaatctgcgtataaagcataaagacagaatcggcatcgtcggcagaaacggcgtcggcaaaacaacgctgatccgctgcatcatcggggaaagagaactgtcggacggcaccattaaagtaggggaaaatcttaagataggctacattgatcaaaagagccacgtcggagattcgagtcagacgattctgcaattctttaaagaaaatctgctgactgaagagggcatggcccggaatatgctggccaagtacggattttacgggtcgtcggtctttaaaaaactttccgtcctgtcgggcggtgagagaatcaggctgaagctgtccatcttaatggaaaaaaagctgaatgtcctgatcctggatgagccgaccaaccacttggatattgaatctcaggaaattctcgaaaacagcctgatgcagtttcaaggcaccatcatctgcgtttctcacgacagaaacctgctggagaagttcaacaagattttctggcttgagaatcaaaacgtcaccatcttttcaggtccatacagttacgccaaacaaaaaaaacggcagattgccgaataaaaggggaatggatatgaccattgacagactgacaatcaatgagttatcgtacgatctttttgtaagcgagtatgctgataagaaaccttttattttgacgggggcaatggatcactgggaatgcaggccgtggacgcttgaatacattgacgaacactatggagacagaatggtcaccatccggaaatcagatatcgaaggggtcaaaacgtttaaacaagtaaagctttccaactatatcgagtacattgatcagaatgatgacaaatggtactgtgactggaattttacgcagctgaaccaaaatgacttagaccttgtctattccgcacccgagtattttacaaaagacacattgagagcggatgaagaaacgggacgggactggaaatggttctttctcggttctaagcagacaggcacgccgctgcatcaggattttaacagcacgcacgcgtggaacggcgtcattttcggggagaaggaatggattttctatcatccggacgactctccgtatttgtacgaaggaaatatcaatgtctttgatgaaaaagatatagagcaaaaaccgctggcgcaaaaggcgtctccgatccgcttcaggcaaaaggcgggagaaatcatttacgcgccgcgccattggtggcatcaagtcgagaatacggaacatacattggcagtgagtgagaacttttggtttaccggagagcggcttgccaatcagatataaacgaaaggctgaggagcacctcagcctttttttgtatggattcatttcatccggtccagaccgaattttttcaggcggtattgcaggctctgcctgctgattccgagctcgtttgccgttttggatatgttattgccttgttttctcagggttttttcgatcatgtatttttcgaagttttccattttgtcttttaaatctgtgccgggctgggtgcttgcggctgctttgctttccgtgtcagcgggtttgattttcatccggtattggtaaggcaggtgggccgccgtaatcgtcgtttcatccgtcataaagttcatggcgccttcaatcatatgttcaagctcgcggatgttgcccggccagtcatactccaggaaaaattgctgcacatcgtcactgatcgaatcgacatgcatttgaaacaggtggttgtttttctgaataaacacttcggccagaggcagaatgtcttccttgcgctcccggagcgggggaatgatcagcgtgacaacgcttaagcggtagtataaatctttgcgcagccgctcttctgaaatggcggtgatcgggtcttcattcatcgtggcgatgatacggacgtcaatcggtttgtcctgagctgatccgatgcgcctgattttcttttcctgaagggcgcggagcagttttgcctgcaggctgagattgagagagttgatctcatcgaggagcagggtgcctccctgcgcctgctcaaataagccgggctggtcgatggctccggtaaaggcgccttttttcgtgccgaataaaatactttcgaccagactgtccggcagggcggcgcagttttgtgagatgaacggggcgcctgagcgctggctgccgttgtgaatgctttgggcgaacagctccttgcctgttcccgtctcgccggccaaaagcacggacgatgatgtacgggttgcccgtttcgcgttttcgatgacttcctgaatgaccgggctgttgccgagaatgctgtcaaacgtgtagctgttctgttcttttctgtgcatgttctccctgatcagccgttcgagcttggtgacgtccttggcgatttccacggcgcccttgatctcgccgttttgcacaatcgggaaggtgtggttgatcgtcgtgatttcctggcctttgttattgaaatagctctgctttacatttttaatcgttttgccttcttgaagggcctgaacgagcgtgctgtcctgctgattggaaaacataaatacatcagtcaggtttttatgcaggacgtcccgttcatccatatcttcaatctgcatcattttcttattgtaaatgacggtgctgcccttctcatccaccacatgcagcccgacatcaatctcttccagaatgctttgtaacacgagtgtgtaaaattcgctggttgtgtgcaggtcaattccccctctcaatcgtcttaacattcattattttaaaataaatcgaacaggaaacgcaaaaaaattttgcgcttggctgaagtttgcacgcaaactgccggaatattttgcaggaaaagaaagaatgctggcgaaacatcccgttttttcggattggcacggaacttgctttataaaaagggaaagcaagatctaatgttgaatgattacaaaacaagggggaatcagattatgtcagctttcacaaaatctcaagaaattatcagtcaaacttcacattacggcgcgaacaactatcatcctctgccgattgttatttccgaagcgcagggtgtttgggtaaaagaccctgaaggcaatcaatatatggatatgctgagtgcttattccgcggtgaaccaggggcacagacatccgaagatcattcaggcgctgaaggatcaggcggataaaatcactctgacgtcacgcgcgttccataatgatcagctcggcccgttttatgagaaaacagccaagctgaccggaaaagatatgattctgccgatgaatacgggggcggaagccgttgaatccgctgtcaaagcggcgagacgctgggcatatgaggtcaaaggagtagcggataatcaggcggaaatcattgcgtgtatcggcaacttccacggcagaacgatgcttgcggtatccctttcttcagaagatgagtataaacgcggtttcggacctatgcttccgggtataaaattaattccatacggggacgcagaagcgctgcgccgggcgatcacgccgaacacagccgctttcttattcgaaccgattcagggagaagcgggcatcgtcattccgccggaaggatttttacaagaagcggccgctatttgtaaggaagaaaatgtgcttctgatcgctgatgaaattcagacgggactcggccgcacagggaaaacattcgcggttgattgggaaaatatcgtaccggatatgttcatcttaggcaaagcgctcggcgggggcgtcttcccgatttcgtgcatcgcggcgaaccgtgacattctcggcgtgtttaacccgggttcccacggctcgacattcggcggaaacccgctcgcttgcgcggtatcgctcgcatctcttgaagtccttgaggaagaagggctggcagagcgttcccttcagcttggccggtattttaaagaagagcttgagaaaattgataacccgatcataaaagacgtgcgcggacgcggcctgtttatcggtgttgaactgacagaagcggcccgcccgtactgtgaaaagctgaaaggcgaagggcttttatgcaaagaaacacatgataccgtgatccgttttgcaccgccgttaatgatttccaaggaagacttggactgggcgatccaaaagatcacaaacgtgcttcaaaacgcgtaataccttgatgcggcaatgctttccctcggcttgtatggaatttacaaataaaaaattcagcacactctatttgcgcggagacagtattttagtataatgtatctttatgtacgaaaatgaatttcatataacattcatatacaaatagaggctctttggacagcaaatcggtttcaaagcaccggcttggttccaatacaagttgctgaaggggtgcagaatagtgaatacaaatcaaaaagagaatcagcttcagcgcacaatgaaatcgcgccatttgtttatgatttcattaggcggagtgatcggcaccgggtttttcctgagtaccggatttacaattaaccaggcgggaccgctgggcgcggttctgtcttatctggtcggcggttttattatgtttttgacaatgctctgcttaggcgagcttgcggttgcccttcccgtatcagggtcgtttcagacgtacgcaaccaaattcatcagccccgctttcggtttcgcattcggctggctgtactggctcggctgggcggtgacatgcgccattgagtttttatctgcgggacaattgatgctccgctggtttccgcatgttcccgtatgggtgtggtgcctcgtgtttgtcggactgatgtttcttttgaacgcgattaccacaaaagcgttcgctgagtcggaattttggttttccggcattaaaattttagtcattctgctgtttattattttgggcggtgccgccatgttcggcctgatcgacatgaaacacggcgagcaggctcctttcttctctcatttttatgaggatggattgtttccgaacggcattaaggctatgcttattacgatgattaccgtaaacttcgcgttccagggaacggagctgatcggggttgccgcgggagaaagtgaaaatcccgagaaaacgattccgcgctctatccggcagacggtatggagaacgcttgtctttttcgttctctccatcatcgtcattgccggcatgattccgtggaagaaggcgggagtggtcgaaagcccgtttgtcgtggtgtttgaacaaatcggtattccatatgcggccgatattatgaactttgttatcttaattgcgctgctctcagtggccaactcaggcctgtttgcatcgacgcgtatcttatatgccatggcgaacgaaggacaagcctttaaatcgctcggcaaaacaactaaacgcggcgtgccgatgaacgctctgatcgtgacgctggccgtcgcctgcctgtccctgctgtctaaagtggcagcgccggaaaccgtttatatgtttctcttatcattagccggactaagcgcgcaggtcggctggattacgatttccctgtcacagctgatgttcagacggaaatacatccgcgaaggcggcaaagtggaagacctgaagtttaaaacaccgctgtacccggtgctgcctattatcgggctgacgttaaatacggtcgttctgatcagtctcgcatttgattcagaacagcggctcgccctttattgcggcatcccgttcatggcggtgtgcgttatcgtctatcatctgtatgtaaaaaagcataagcagtcagaaaaacagatagagctttaaatcttttcgtgtccaagtcatctttgagaaacccgcacaggacaacatacaacatgttgaggtggaaaaacggatgaacaagaatatctcagttattggaatgccgatggatttaggacaagcacgacgcggagtggacatgggcccgagcgccatccgctacgcgcatctcattgaacggttatctgacatggggtatgcggtggaagacttaggcgacatccccgtcaatcgtgaaaaactcaaacatgatgaagagctgaaaaatttgaactctgtgctctcggggaacgagcagctcgcccaaaaggtggacagcgtcattgagaatgagcggttccctctcgtcttgggcggcgatcacagcatcgcgatcggaacgctgacaggaacggcaaagcactataaacagctcggcgtcatctggtacgacgcgcacggcgacttaaacaccctggaaacatcgccgtcaggcaatattcacggaatgccgctggccgtcagcctcggcgtcgggcacgacacgttggtgaatctgggcgggtatgccccgaaaatcaagccggagaacgtcgtcatcatcggcgcgagatcgcttgatgaaggcgagcgtgaatacattaaggaaacaggcatgaaagtctatacgatgcatgagattgaccgcctcggcatgacaaaggtcattgaagaaaccattgactacctgtcagactgtgacggcgttcacctcagccttgatctagacggccttgatccgagcgacgcacccggcgtaggcacgcctgtcgtcggcggcatcagctaccgtgaaagccatttggcaatggaaatgctgtatgatgccgacatcatcacttcagctgaatttgtcgaagtcaacccgatcctcgatcacaaaaacaaaaccggcaaaacagcggtcgagctggtagaatctttgttaggaaaaaaactattataaaatatgcgcctccgcacctgcggaggttttttttgttgccacgaggaaactagcgggctgccaccctctttttggacctgtaaatatgatatatttattacacaaaatgggaaagggaggtgtcctgacagatggctgaggtgatggcccacgaaacagttgcgaaaaaaatcagtgactggtatgaggaaatcaaaaagcacaacactgaatcggctgaggcgttaagagaacaactgcttacggatctgcaaaatatgacacaaaatcaaacggtgctcctttattttaatttaattgattcccgctataagcttttaatggaagagtatgagaaaacagacggcattttaaaaacgatccagctgaacgccgataaagaaaaaacagaccagatgattcaatactattattatttcttttccggaatgcacgagttttaccgtaaacggtttatgaacgccattaatttttaccggattgctgaaagcaggctccggcacataccgaatgagattgaaagagccgagtttaattatcaagtggcgattgcctactatgaaatccgccaaaactactttgcgatgaaccacgcggaaaaagcgttggagatctacaaagccaatgaaatgtacgcggtcagagaagcacagtgtttaatggtgatcggctgtaacagaatggacttgttccactatcagaaagccgaagagctcctgcagacggcggttcatcaagccgccaaagcgggcgatccgcatattgaagcgctcgcccactttaacgcaggcatttgctatgaaagacaggaaaaactggaagaggcgcgggtcgagtttgaaacggctcttgatcaaaaggagcatttgcgatcagcgtattcggtgcggagtctgtacatgctggccagagtgttattgaagcaggcaaagacggatgagggccgattttggctgcataaagcgctgaatgccgctgaagaaaaaaacgagcccgtatacacccaaaagctgcgcatcttacagcatgtctttattgaccgcaatgaagaagcgcttgaatcagctttcgccgagttaagaaggaaagagctgtggagtgacgtttccgatttgtcgtatcaggccgcggcgcattttaaaaaacaggagaaatacaaaccggcggcgaagtattttcaggaatcaattgatgccaatgaccaaattttgagattaacggaggggattcgtaatgaaaacatgtaaattcattgtactctcagcagccttggcaagtctcatttcgattggattatttgcacaaactggttcaacggcacaagccgaacaaatcataaaaccggcggaaaacggagccttcggataatactgcatgatatcgctttcgtgtaaggagtgattcaatggctatcacgctgcagccgatgacaggacaagagtttcagtcctatctcgctcattcaaccaagcattacgctgaagaaaaggtaaaagcgggaacgtggctgcctgacgaagcgccggaattagcggagctgacgtttgaagacctgcttccagacggcttggagacagccgatcactatttatggacgctgacattggacggaaaggaaaatgccggctggttgtggctgcacgccgatccggaccacccgcagcaggacgcatttatttatgatttcggccttcatccgcctttccgcggcaaaggctatgcaaaagaggcgctcgcaaggctggaggacaaagccaaagatctgggtgtccgcaagatttctctccatgtgttcgctcataacgaaacggcgcggaagctgtatgagaagacgggattcctggagacggatgtcattatgagcaaaaagctgtcatgaaaagaggcccgcacgatgggcctcttttgttattcatctaacaatgtcatcatttgttccgggtaacgctcgccggccgccgtgccgatcggaaacatttcatccaaccgcgccttcacatcctccggaagcacaatgtcgagagcggcgaggttctcttccaagtagtgtttcttttttgtacccggaatcggaatgaggtcatcgccgtttgcgagaacccatgcgagcgcaagctgaggcgcggtgatattcatttcccgggcaatggcggtaaatttttggacgagccctatattcaccgccaaattgtctccctggaatctcggcgttcttcttctgtaatcatcggcatccagctgatctgtcgacgtcatctttccggaaagaaaacctctgccgagcggactgtaaggcacaaatgagatgccgagctcacggcaggcgggcagcacatgctcctctgcttccctgctccataaagaatattccgattgaagcgcggcaatcgggtgaatgcggacggcgcgcctgatcgtttctgcggaagcctctgacaatccgatatacctcacttttccttcgtcaatcagcttcttcatggcgccgacagtttcttcaatcggcacccgcggatcaacccggtgcagataataaaggtcgatataatccgtcccaaggcgtttcagactggcatcacacgcttttttcacataatcgggccgtccgttgatttcgataaactcacccttttcgcttcggacataaccgaatttcgtcgcgaggcacagctcctttctgaatggggcgagcgctctgccgacaagttcttcatttgcacccaatccatattgatcagccgtatcaaacaaattcacgccgagatgaacggcatgatgcagtgtggagatcgactcttcctcactctggctgccatagtattccgacatgcccatgcaccctaatcccattgcggaaacccgcatcgaaccgatcgttctgtccttcatatgtcctccccctttcttgtatgataaccagatttcctgatatttgaaaatgatttatgtatatgatttacatattgttataaaatttttaaaaatctgtaaattgtatatttttttatcacaatttcgtcatataatgaaaacgtggaaaaattaacctttgagaaaagaggcgaagtcaatgtgtaaaaagctgttcaaagccgtcctcccgtttgccctgtcattcaccatggttctgtcgttctccggtttgaatgtaaaagcgaaagaaacagaaataccacgctacgcaaaagaaatcgcagaccttcagcagggcacgactcctcaagacgttctccaatccgccaaagagcttgccaaacagaagcacgtttcaacagaagcaattctcaagcagtttcatcaagaaatcacggcagacaaggtgcaaggaaatgtaatcgcttccaaagacggactctctgcgatgggcggatcgtcaggaaccaaaaaactcccgaaaagcacaaaaggcaatatttattacacgaactcatacacggcttattacaatcacgggcatgtcggcatgtattcatccgctgataaaattgtcgaatccgtgccgggagacggcgtccgtcagattgcttataacggcagagaagtcgaagacaattcaatcgtccagaccgtgaaagttaccgatgctcaaaaacaagccgccgctgactgggccgtatcaagagtgggtgatgagtactccttcaacttcgtcaataacagaaatacgggccatgaaggcgccaaaaactgctcaaaactgctgtggtcggcattccttttaaaagcggggattgatatcgactctaacggcggcttaggcgtatacccgcgcgacatcacaagctcgtcctacacaaccacgatcctgaccattcactaaggagaacaacgtgaaaaaaatcatctggatacccttagtgatcatcgccgccgcagcggtcttatgcttcttctatttccgcacggaagaccctgcggaggttgcgagagacacattaaatgaccctgattttctgaaagataaagaggcgttgctgtatttctccactgcggctgaccaagacacgttcggcggcggaaaaagctacgccctcttcgccgatgaaaaagggcggctttcttcttatcaaatgaaggggcttgagctcggatcggccaaagtgcatgacgaaagcgtgctgctggaggacaaaaaaggaatctacaccgttcaggacggccttcacacgtataaaagagcgtaccagcatacgggagacagcgcgggatatatcgaacgggcgaaaggcttttacacgctgtataattcgggctacgacaagagcggcggcagctatcgctcagagctgtaccgccagatggacggcaggtggaagcaagacgtcatcccgcactatatccgcgcctcaggcttttttaaagatcatcttttcgcgctcacgccgacagatgacgaaaaaggctatcacgtccaagacattcaggccgataaagaaaagctccatacaacatcaatcgcgacgtggacgtataaagaaggcacgtctgtcgaatcccagctcgccgtggacgacagcgctgtctgctttgttaccagaggagaaaaagccgatcacatctatcaaatggtgaaagtcatgaaaaacagcggcgccatcaaaacgtatgacatcgccgcttataaaaatgacgaacagacgatctatgactccatgccgttcagcttcaaaaaaagctttttcatggagcatcgcagcttctatttcgttgacggcttcggaaccgtctaccgcatcaaccctgagaccggaaaaagcaaaaaggccttcaccctccccgcatcacgaatgaaggccgacttcaaggagctgacccatcaaaacggaaagctgtatctgttcacgtacagctacaaaaagcccgccaaaatcgaatccttcgacctgaaaacgggcaaaaagctgaacgacctgaccatcccaaacttaaaaaacatcgtcacgccgaaaagccatctcaagctgtatgatgtgcaggtgatggatgggttttaaagagtatgaacatttcggaagagcttgccgcttttggtaagctttttataatgaaacgttactgcgggaaagaaggtgttcatttgaaatcattcagtatcttcttattgttgtccgtcatttgtataaccattgtttttgtcataatgaatatgttgattggataccctgatgtgagtaacggggcattgattatgattgtatatatcgttgtgaccctcatgataaggctatatagcaagaaaaagaaatagaggaatttgaaccgtaaaagcagaagacagtcagatgaaggagggagccgatgaagaaaaagcttgccgcggtgaccgtcaccattctcctggtttccgtgataaccaactcttttttaaacggcggaaagccggactggattgatgtatgctgtacgctgctggcgtgtctattaggaattctgttcgtccttcgcttagaaaaaagagaaaacacgtaaagagccggatgctgaaaacaccggctctttttgcgcgtgatttgccgaattgtggataaaactcagcccgaagcactactaacatgtgtataaataggttatattgaaaagagaacaattgccgcgcgcaaaagaaaaccggaggatgtaacaatgaaaaccgcttattattcttgtgaagaacatatcgaaaccgtgctggacatgtacatagatgatcatgagcttccgcccgaaatcagaaaaatcgaacatactaacagtttatccacagcctgtgaattatgtggggacactgcaacatatctagtagggaacgaatgatcctacacaaaatacagaaaagatatccacaattgtggacaatatatatgaataacttgtttctaaagtggggatgacctgtgaatatcaatattgtgaccatcggaaaactaaaagaaaaatacctcaagcaaggcattgaagaatacaaaaaacgactctcagcctacgcaaaaatcgacatcatcgaactcccggacgaaaaagcgccggaaaacctgagcgaccaagacatgaaaatcgtcaaagacaaagaaggcgaacgcatcctggccaaaatcagcccggacacccacgtcatcgccctcgccatcgaaggaaaaatgaaaacatccgaagaactggccgatacaatagataagctggcgacttatggaaaaagcaaaatcaccttcgtcatcggcggctcactcggcctaagcgacgccgtcatgaagcgcgcagacgacaaactgtcattctcaaaaatgacatttcctcatcagctcatgcggctcatactagttgagcagatttaccgggcgtttcggattaatcgtggggagccttatcataagtgagtgaggtttgcaaataccattttcttgatgtattcagcataaaaataatcgttaaggatcatattttgttataatatattcatatggaaatattatgaatgaaaggatgaccattttggaaagaaaaatagatttacttatgaactcgcgtttcggggagagggtagccgaagaggatgagaatttagcatcgtattttgttgaaacggcagtatggaatcaattgttgatgggggaaattgatgtagtccgaggagtgaaaggttcaggtaaaagtgcattatatatgcaattattaaaaaaagagggtagttttgctgcgaaaaacaccttattaatacctgcagaaaacctagagggcacacctgtttttaaatctgttcttggtgatgctgatttaactgaaacctcgtttcagtacctatggtctatctatatcattactctgataggtgataaaatcaaagattttcgtaatagaagcgaagaagtaaaagattttattagaagacttgaattagaaggtttattagaaggtaaagggataagacgtctccttacgaatgttagagattatgtttttgaattctttagaaatgtaaaagaagttgaaggagtagtaaccgtagaacctacaactaatatacctattttaaaagggaaaatctctttaaatgaaccaagtaaagaacatagagaattaggagctatatcaatttttgaacttcttgaaatggctaatgaggcacttaaaagtgttgacttaagcgtttggataacatttgatagacttgatgtagcatttcccggaaaacctgaatttgaaaccttagctctaagaacactttttcaggtttacaataatataaaactgcacaaacatataaaattaaaaatctttattagagaggatatttggaaacgaattactaaaacgggttttagggaggcaagtcatataacaaagcaagtgacgattgattggtcagaacaggattttttacatttactggttagtcgtattcttgaaaacgatattctttgcaaattttttaatgtggaaaaagatgatgtattaaaagatagtgacaagcagaaaaaaatattctattctattttcccgaaaaaagttgaagtaggaaagaatcctgaaacatttaaatggatgattggacgggttaaggatggattaaaaataacagctccaagagaactcattcatttaatgaatgaggctagggcaaaacaaattaaattgttagaaactggtactccagaaaactcttattcagaaatcataggacgaagtgctttgaaggacgcattaaaagtagtatccaaaattcgtttagagcaaacaatttatgcagaatatgcacatctaaaaaaatacatagaaaaacttgaagaccagaaaactgaacatgatgttggtaccctttcaaaaatatttctaataaacaaagaagatacaataaatattgcaaatgaattagtgtctattggattttttgaggaaaaaaagggtagtcataaaccttattggacaccatttctatacagagccggacttaatatggttcaaggtaaggaagactaatattatagagataagagtaaagggggagtataaagcttccctattaattttttatgcttaagtaactctatattagatttaaaaaaattcacataaagctacatcaattctcaactgtcattagtcttaattaagcttgttaccatagggatgtttcgaagactttaatcaaaaatgattcaaatctcacttagatagagactatgataaattttatattatttaagtcgtcatttaattaacgtttattacaatagaaatataatctatagagggtgttgaaatttgaagaatgacattttgttacctaataaaattaaagtttttataagttcaaggtgtggacaaggttttgaaaggtatgatgaagtaagaaaacaactaaaaaaacttatcgaatcgacaaagattgctgatgtatatctatttgaggaaagtggagcttcgacacagtccgcagaacaggattatttatatgccctagatgatagtgatgtatgtctattcttaatagataataaagatgatgttacatctgcaattgttagagaaataactagagccaaatcacacccaaaaaagtcaatatatctattttgtaatgaaaaagaaagtaaacctacgcaaatccaagaagaacttattggagcaaaaggagctaaatattatatagttaatagttttaatgaatttgcaaatcaaggatttaaagatttaataacagacatatgtaatatttatagacactattgtaaaaatagactcatagaccaagaatttcacaattctgaacagaataaaatagaaataggttcaatagcttctgaatcactagagaaacgtattttacaaggaattgataaatcaaaagcatatatcggaaaaaagatattttctgttaataaagaagtgaaagaaacgagtgaattagatagattttatgagcaatttctaaaagtattatttggtgaaaaaagtattgaagaattcaatggggatttatttttagagcaaataaaaaaagagcaaagtgataatatgcatctagtagtaaaattaagatggaaagctattcagttttactggctcgatgattttgattctgtattaaaatacttaaaggaagcttttgacttatgtaaggaaagtgggttgcctgattggatttcacaggatatactgatagatttaataaatatagaaaatcaaaagttaaatcaggaaaataaattctcctctaggaatgctgcacaagaagagttagaaagtatgcgtcaatctctgttttacccatcaattgatagatatgaaaagctattatataaagaaattaataaagcatcaacaaaaaagaaaactgaaactgtgtatactgttaaccttggtagtaatttagatgtttatattaaatatttgactaacatttatattgttggtgcctttaatggatctttaactcaattattattattgagaaataaaataaaagatatatcatttcaattatgtgaggaatattccaattgggaattcagagtgttgctgttaaaaatggcagtaatagttggagatagcaagcaaacagaaaatataatttcctactttaatagcatattaggaaaaatcaattatattgatgtaaaaaatatttataattttacaaactgcctcccggtaaaatcagaaagaataaaatctaagctagaagtatttaaacatttagggtattattttagcgatgaagattacatgtgtatcaaaagagagttattggaagagattcataattatattgataatacttttatagtgtctatgggaaaattaatatttgattctttgaaagaaaatatcaatagaatcgaagccgatgaaatatctagagtatgcataaaaattttagaaaaaaagatgtttcgcttttatgatgatgctttaaatttgataggaataataagttttaaagggatatctactcaaaaccttgaaaaaataaagaatttgttgaaaggaatcattttagattctaatctagcaaaccagtgtcataacctcttatatgcaattataaatttaagaaaacagataatagcgggtacttcggaattaaatcaagttgtattaagtaacatgtctgaatcagatcgcaaaatttataatttagaaacatctagtgtcaaaagagaaagccatattatgagttatgttcaggagatcaaggaacaaattgagaaacaaggtaaaaatgggatttacagtgtgaaagcgcaaaacccatatctaataatccaaaatatcattaaagagggttgtgaaatagttgataactatctattaaatgaagttcttcaagtatgtaatgaatcgttatgtgcaactaatctactgtattctgataaggtgagtgctttacaattaactatttatattaaacagaatttccaaaatattgattataattttaaagatttatatcaatatttgattaaacacgaaaaccatctctttgaaggaaaagatgatctttttcaaaaatattcgacattaaccgtaaagattaattattttatgcttaaaatggtatgttgccaactagataatgttgatttattaaatctattaagtgaaattaataatgaggatgagtttgaaaaaatccaatgcttaaaggccattataaatgctataaataatgaatcatttaaaaatatagaatcagatattcgtagtatcattattcaattcactttaagtttgaagaatgacaaaaatcaagatatacggtatttatcaattaaagcattgctaaaaatgataacaaccaaaactcaaaaagttatactgactcagctttcacaatctatggattatgaaaatgtatatataaaaaatcttataataggaaactttgaaaaattagcaattatagattccaaagttaataatttaatattgaagaaagcttccatagataatcattatttggttaggacagaagcacaaaaatatatacagactagagcaattaatattactcaataaacttgtttagaaaaaaagagataataaatgtgaatcaaataatttactttcaaatttgaaaacaaattattaaggagtaaatacatgaaagaagaaatgattttaagaaaggtgatttattttttatcaacggcagaaacaccaagggaagtatttttagtatggaataagcacaaggaacatttaaaatactttaagttgagtataaacctagataattatgataaagatactttcccggttggattgggagaattggtaaatgcagttgatcaagactttatttcttactttcaaaccggaaagttatattacatggatgatgaattactgaatgatatgttatttaatggaagtatatcatttcctattgactattctgtgatgttagatactaattatgctagttatattcctcgctttttgaacaatcaagggagtagtgaatttgagaaagaaagtatttacaaaactatagatactctactaaaacataaatttcattatgattataatttctatttagtagaaaattataataaaattattaaagataatgggagttttgatgcttctataaaaaaacatagggatatgtacgagaatttagtatttttagagctatttaaaagcattgataatgatatatacataaataagaatattattgaataccaaatttcgaagtttgaggctatccaaagagtagacgatataatatataaattatataaaactagggatggtaaaagttcattaaagaagttcttagatatgcatcagaatttaacattacttctgatcggaattatcaaaatacagttcagttcaaaaaaaaatgcaaaaaataaaatgattaagttacttgaatatgtccaaaataaagtaggaatttattatgaaagagaaatggttattgcgcttaaatatttcaagaatcctaaatctgttgggatatttaataaaattaataaaggtggtaatcaaaaaaaattactcgaaaaaattgaaaacacagcttgggattttatggctccgagggtaatggaatatttctctaacttgaatagtgaaggaagatattttataccatttttcttatcccacgacaaaaacttgagagagcttttaactttatttgaaattaaaggggttttacaagatattagaacgggtcagttaataccattcacaaaaatctcaagtgctgagctctttaaaaatgaaggagtagaaatagatctttctttctattctcaggaatccacaaataaaagacgattaatatatgaaaagaatattaacgaaggttttagaattctgcaagatgaattctctgagttgaatgacataatgaattaattggagcctctctatattattttacatttaatttttatgttattttatatagcatgttaacagacctaggtataaaacgctggttttgttaatccctctgtgctgtataggcaataggataaacacattattattcctttgcggggaagttatataaatgcatttgctaaaagtgaatttaaagtgattattctactaaccgtacaagaaaataatacccatatcgcagtaaactgtgacggctaaatatttctagggagataaagccttgagtttaatcaatcggatgctcttatgtcaaaggaaaatactttttatataaagactcggtaaaccaagatcataagtcccgattatcttgtatagcaggccgatttgttgtcaatattcgatttactatgaaatcacttgttggcttatagtgaacaaaacaaaaaaaccagatccactaaaatctggttccccacagctgattagaagcaacctactgttgcttctctttcaccatctttataaagagaaagaagacaatgaatacaataaaataattcaatggattcttaacgatacttatctccagcgaaatctgtaagagtatccagagaatgaagatggctagtattgaaggaatgatgattttgtacatgtcgaccaccttccatagttagtaaaagaaaggggcgcgggccctttttttttcatgattaaaagcaagatgcggcagctcccgtcattgcaccgccaacagcgccggtaattgctccgacggcacccgctcctactgttccgatgccgggtattgtgactgttcctacagcagctcctgcaagacccagtgtgccgccgccagttaccgcaccgccgccagtacctagaatacatttcccgactgattgggtgctgattgacccgcttgtttttccagcgtctttgtttacgactttgactaaaacgccatttttgattttttcatatttcagtgtaacggggtcaccatttttgtcagtagagcttttcggaagagcctgctcctcgcccgttatgttgtcttttagggttgcattgcctttagcgtcaatatgaacatctgcatgattgaacgtcatcttcagctcactgtcgttgaggttttcaactttgtatgtagcttgggaacctgcggcagccgcagcatgaggtaaaaccgggagggcaaaggcacctgctaggaataccaaggctgccagtttcactgcggttagcttcattctgctttgcataattgatcctcctcctttggttgccatactaacaaaggcattctgcttgttaaagccttaccatataaaatgataaaaaattcacccaatttcatcacattaaccaacaaggtttgtatgtttcccttcgaaagtcataggagagcagggttcatatctgatgcgaagttatcaaggaggatagaaaccgtaaagaagagctcagagaagcacctttattgcgaacaacagcttcttccgcattttccacacgacagtataaatccctttccgtcacggaaacctagtggaaaaggtttctgaaaggagggggcgtatgatgaaaagtgaaaaaattcaaaacaaaacatctttggtttggaagatggcgattgcctctgcggtttcttgggaagcggcaaaactggcgggctctgatcacccctatttagcgcctctgtctgttatcttatgtttgcagccaacgatagatcagtcgattcgtttttcttttcatcgtattgcgggaactgcgattgggatcatgctaacgtcctttcttgtcagtcacttgccaatgaatggctggatgctggggctgttcctattaggcgggacttacattgcaaagtggttacgaatagatgtaacggttctgcatcaggtagcgctcaccattttattggtctttacgtttgaacgaaactctaaagattatgcattcgaccgaatcatcgatacggtgatcggcgtcatcatcgccattctgattcacatgttcctttttccgccggactacacaaaaaaggcagcggactcttttcaaacattggcccgtcagctttccgacgcactttcagacctttccaaatgggtgcaatcagagtggggacaaggaaaagggaaccttatggaatataaaatgaaccatcttctgcaggagctgcatacggcaaaagagatgctgcaaacagcctctgacagcttaaaattcaaccccgtcagaaaaaaacataaaaacatcatttcaagctatcaaatagagatgcaaaagttgaacgccggatttgagtatctgtcaaatatagtgaaaacgttaaaagaatgggaaaaagaaggagctttatcttcaagtgataaaagggagctggggaatgatttacaagtgttaagtgaatacttttcggatcttaaaggcatacagcagggtgaaacagacaatcggaaacagaaggaacagaacgtgttattggaatctctccgctccgacatgctgtcgcacccgccgcccggtcataaggtctataaagactctttttttttagaaacgaagaaattgctgaagcgtttgtaatgttttctggaaaaagagaatacggatatacagatatgatcaggtaaaagcgggggacatgagatggatgatatacaccggattttggatgtcatcgctaattctaagaaagctaaggtactggctaccatcattcaaacagaggggtccgcttataagaaagaaggggcttcgatgttgattttagaggataaaacaagagtcggaatgttatccgccggttgtctggaagaagatctcgttgaaagggcagaacaggtctggtctgcgggagaaccgttgattgtccgctttgatatgagtgcggaagacgatttatcctggggacagggcattggctgtaatggtgttttgacggtgttgcttgagcctgtaaaaggggaattggaacggcatctgatgacagtcaagacatgcttagatgaaaaaaagtctgtgacccgaatgaagcgattcactgaaacgttagagccgaaggaagatctgtatatcgctgaagacggcagcgtgtttggaaccggggatgtgatggaacaaggccgtattcaaaaactgagacagacggagaagggaatcaaaagggatgaacatacatctgatttgttttttatccatcagatggtgccaaaaccttgtttatatgtcttcggagcaggagaagatgcgaggccgttagtttcgttggcggctcgtgcgggctttcatgtgacggtgattgactggcgtcccgccttatgtcatcacggccattttcctgaagccggccatttgataacgggagcgcctgaagaagtcatgaaaggcctgagcatgacaaaaagggattttgttgtcattatgacgcacagctttcaaaaagatcagatcattttacatacattaaaaaacgagaatgtgttttataaaggcgtattaggccccagaaggcgtacggagcggcttttaggcgggggtgagattccggaagatatacattcccctatcggacttcccatcggggcacaaggccctgaagagattgctgtaagcattgtcggcgagatgattcaaaaaatgcgaaaacaaaggtctcgcctatgaaaacagcaggcatttacctggcagccggtacaagcagacgcatgggaacggataagcgaagtttatttctcaatggcgtttccctcggaagtatggctcttaaaaatgccttgttatctgaattagatcatatttttgttattacgagaaagggagattcactgcattggctttcggattttttctttttagatcccatgtcaaataagtggagccaggcagaatgtgagcaagcgggtaagggccaaggccattctatacaatgcggtttgcaaaaagcggcagcgtacgaggctgacgccgttatcattctccttgcagatcagccgtttgtcaccgcagatatcatcaatacgttaattgattcctatcaaaaagagcgccgttattcatttatcgccgctgaaaatcagcatcttcctatgccccccattttattctcaaatcaatgtttcccggtattgcatcagttaaagggagatcagggcgcccggcatgtgatccgtgaaagtatgatcaatatgggaaaaatgatcagctttcaagaccctttgcttttttatgacgtcgatacagttgaagattatacgctgctgctgaataaattcggggagtgaatgagttggagtatatcgggaagagtgtcattcggaaagaggcccttgaaaaagtgacgggtaaagcgaaatatacggatgattttcaagaaacagggacgttgcacgcaaaaatgctgaccagtccatatgctcatgccgatattgtgtcgatggacttttcagaagcttggaagattcccggcgtgagagcgatattgggggatgaaccttttccgcttgcaggtgaagaaattaaagacagatcgccgattgcttataaaagggtcagataccatggtgagccggttgctgttgttgttgcggaaaatccgattacagctaaaagggccgcggatgccatcaaagtatcctataaacctcttcccgtcgtcaattccccccgtgaggcctttcaaaaggatgcgccgctcgttcatgaacatgcggaccgctatgagaagacaaaaggtgtattcccggttccgaagacaaatatcgcaaacgtggataaggttagaaaaggaaatattgaagacggatttagggaaagtgatgtgacagcagaattccagatttcctttaacccttctgatcacgctgcgatggagacaagatgctcgatcgctgaaattcgggcggatgaggagattatcattaccacatcctctcaagccccttttgccattaaaaaattaatgcagtggtattttggaattgaacccggaaaggttatcgtcaaaacgcctttagtaggcggggcgtacgggggaaaagcagccgttcagttagaggtgattgcctatttggcatcaaaagcagtcggaggccggcccgtcaaattgtttaatacgagagaagaggatatgatcacatctcccgttcatgtaggattggatgccattgtcaaattaggggccacaaaggatggaattttaaaggcggcggacattcagcttttatttgatggcggagcatactctgataaaggagtggacatcagccgggctgcggtggttgattgtacgggtccgtacgctatcgaccatatatcgtgtgattcatattgtatgtatacgaatcatccatatccaagtgcattcagaggctacagccatgctgaagtgttatttgcttttgagcggacgatggatgtattggcggaaaagctgaacatggacccgttagaacttcgctataaaaatgccattcgccccggtgacaccacaccgactcaagttcttctcaattcaagcacggtcggaaatgtaccgaaatgtattgaaagattgaaggaattaatgaattgggacgagggacagcgaattgaaatcgacggccggaagatacgggcgaaggggatcagctgtatttggaaaacctcaacatttgatacaaatgcaacgtccggagtgattttaacctttaatcctgatggaagcattaatttgatgtcagggatagtggagattgggacagggacaaaaacagtgttagcccaaatcttagcggaacgaatgaaaatggatataagcaaaattcacgtaaaaatgcttgtagatacacaaacaacacccgagcattggaaaaccgtggggagcagagggacgttaatggccggaaaagccgtactgaatgcagcggaggaagccattcgaaagctgaaggacgcggcatcatgtgtgttgcgagttcctgtcgaggaattggaagtggccgacggaaaggtttattttatagatcatccttctgtacatgttgacataaaagacattgcttacggatatacgtttccgaatggaaataccattggcggccaaatcattgcgagcggcaattacacattaacccggatgacgaatttagaccgggaaacgggaagaggaaagccgggacccgaatgggctgtaggtgctcaggggattgaagttgagttggataaacgggattatacgtaccgaattacaaaagcctattctgttgtggatataggaacagtattgaatgaaaaagctgcaaggggtcaagtgatgggggggatgagtatgggaatcgcattcggaggaagagaaacctttgtatttgattcatatggcagagtattaaatcctcagcttagaacataccgcccccttcactatggagagcagcctgaatatatcattgaatttgttgaaaccccgcatgtgattgcgccttatggagcgcgcggcggcggggaacacggactgctggggatgccggccgcattgggaaattgcctttccgccgctttaggtgtccaattgaatcaacttcctctcattcccgaacaattatggaggacgcaagaggggtggaaagatgataccgtttgattttgattattttaaaccgaagaccattcaagaaacaatcaatctatttcactcgcttgcggccgaaaagaaaacaccaatgtattattccggcggcacggaaattatcacgttaggaaggctgaatatcatctatacggatgcggtgatagacatgaacgcgcttccgggatttcaaaccatccgcttttatgaacatgaactggtgatcggagcgggtgtgtcattaacgaaactggaggaagaaaatccatttccgctattaagtaaaacagtaagtgaaatagccgatcggacgactcgaaataagatcagcctgggcggaaacatttgcgggggcatctactaccgtgaggccgtgctgccgttgctgatttctgatagtttgctagggattgcagggagagcggggattcattaccatcctataaataaagtatttaacaaggaaatacaattgcaaaaaggtgattttttatttcatatcgttgtcgatcgagcgtatgttgacttgccatttgtcagtatcaaaagaagacagcagtggaatgtcggatatccattggtgacagtctgtgcgctgaaaaaagatgatgagatcagaatggctttcagcggcgtatgtccatttccgtttcgttctgctgaaatggaggctgtgcttaacgataaaagctattcattagaagatagagcgcgcaggtctttacagtatgtacccaaacccgttcttgatgatgcggaaggctcaagtgaataccgaatatttgtcttgcaacatacaattttagatgccttacgggaattagaaggaggtccaaatgtctgatcctattacgttgaaagtaaatggcgaggaaagacagatgacggtcagaccggctgatactttgttatttgctcttcgtcttcgtctcggattaactggtgcaaagccgggctgcttaaatggggattgcggcgcctgtacggtattaacggacggggtgccgatgaaatcttgcttaatgcttgcggcagaaggggaaggaaaggatattacgacaattgaaggactgatcaatacgccgattcaaaaggcctttattgaaaaattcgcgtttcaatgcggttattgcacaccgggttttctcatgaattgtcatgctttagtgaatactgagccgaatgcaagtgatgacacgattaaaaattggctggagtccaatatttgcagatgtaccggttatcgggagattgaagaagcggttaaatccgttttacgtatagggaaagggactcattagtccgtaaccgtaaaaaaaagagcccagagaatcatctctgaactccatattcttcacttcatataccgatactcccgcagtttctccaaaatcgccacttctttcatcagttcttcaccgacgtttgtttcttttactttcttccgctccagctctttgtcgactaatcgtttcactgttaagacgtcggttccggtgctcagcacttcggccttggagttaaagtgtttatgggcgacgagctgcataccgtatgagttgtataagagcgtgtagccggcgatgcctgttgtggattggtaggctttggagaagccgccgtcgatgacgatcatttttccgtttgccttgatcggatcttcgccttcgatttcttttaccggtgtatggccgttgatgatatggccgtgatccggattgaggccgaattccttcaggatgtttcggcaggttgcctcgtcttcacgcaaatagtaatacgggtttttcttttctttatgcgtttccttctctttaatgaaataccgctcaaaggttgtcatggcccgttttccgaagagggaggagtattcgcctgtccataagtaccacgtcatatctgtcgccagatcatcggtttcttccggatgggcaaacgcttcccgtaagaaccgttcaaatacatcgagcagctcacggcccgcataagctttatcctctatcatcatcgtttccatgctgccgttttcatcgacgggaatacagccgtgaatcaacaggttgccgttatatttcagatacaggctgccttttttcatcataaaattcatatggcggcccagcttttcggagtgctggacagaaaacagcagcttgtccatgacttctgcttcttcttctagcagctcgtcaggctgtttgggattcaccgtcgcaaagcaggtgttttccagttgatacgtttttccgttcagcgtgatttcattgcggtcataatcgatcttttccagtaacagccgttcttccatattaaagttcggccgtctcttaataatcgggctctcaagcttgaattggatcatcgcgatcgcctgatgaatttttgtgatttgtttaatctcatcttccggtctgttttcgtccgctttcgggcggaaagacgggttatcatcgtaatatttttcggcaaggttcaatagcggtctcagattgatgccgtaaacgtcttcaataatatccagattgtcatagcgggcacagatgcggataatatttgccaggcatacttttgagccggaataagcgcctatccagagaacatcatgattcccccattgaatatccactgaatgatagttgatcagttcttccatgattttatccggctgcggtccgcggtcgtaaatatcgccgaccacatgcagatggtcgaccaccaatcgctgcgtgctgtaggcaagaccggtgatcagcttatcggcctggccgagcgcaatgatctgttctatgatttcggagtagtattgttccttgttggcggcttgttctgttttgtacagcagctcttcggaaatataagcaaattgggcgggcagtgctttgcgcaatttggatcgggtgtacttggaagaacaataagaaacgagcttaatcatccgatgaatcgtttctttataccactcgtttaatgcctctttcgtatcaaagccatgtttgatcagcttcagtttgtcttccgggtaatagaccaaagccgccaattcatcaatttctctatcgtaaatgacgccgttgaaaatatcgcggatcttctcttttactcttcctgaaccgttccgcagcacgtgctggaatgcctggtactccccgtgcagatcactgacgaaatgctcggttcctttcggcaggttcagtatcgctttcagattaatgatttccgtgaccactttttcttcacaatcgtatttttgtgcgagcagatctaaatatttggtttccaatctcgtccatcccctttttatttacgagcaattgtatgataaagtgaatttaaagtatgacataatgtttaaatgattagaccttatatgatagtaccgcataacgcctttttgagacaatgaaaacggaagatacggcgcttcaggcatcaaaaattggaccgggataacgctgtgagcgtatacccctgttgacaatgcattcaacttccattaaaataaaaagttagctgatagttatttctatcggaaactcaatacgtagcaggctatgattgctgtgggtcgcactacagcaggagcggcttctggagagaccgcgggttttccgcggcgccgaagggttcacaatctcaggcaaaaggacagaagagtaccgaatatgtatttgtcatgctgttgattgtcagcggcgcaaatataatttgatattcttatgaccatgagattggagggcatccaatctctttttttattggctttttttgctcgtcgttcactagagaggtaaggaggagtcagatgtggagcagcgagagctaaagagggacttatcgaatcggcacgtgcagctgatcgctattggcggcacgatcggtaccggattgtttttagggtccggtaaggcgattcagctggcgggtccttctatcatctttgcgtattttattgtaggtattgcgctttttttcgtcatgagggcgctgggagaactgctgttatctaaagcggggtaccaatcattaacggatatagccgaggcgtatttagggccgcgtgcagcgtttgtcaccggctggacttattggttttgctggattatgacggctatggcggatgtgatcgccgtcggtgtgtatgtgaaatattggtttgatattccgcagtggattccggcacttatctgtttgctcattttattagggcttaatctgttaacggttaagatttttggagaattggagttttggttcgccttaattaaggtagtcacgattctcgcgttaattgtcatcggggtggttctgctggtgattgggttcaaaacgcataccggaacggtttcagcggcgaatctgtgggagcacggcggcttgttcccgaacggattttcaggctttttgctttcatttcagatggtgatcttcgcctatgtcggtgtggaattagtgggtgtgtcggcggcggaaacgtcaaatccgaaaaaaaatattccgtccgcgatcaataaaattccattgcggattttatttttctacgtcggggcattgatcattcttttatgtattaacccgtggatgcagctgaatgcaacggaaagtccttttgtaaagaccttcagtctggtcggcattccgttagccgcgggaatcattaattttgtcgtattaacgtctgccgcttctgcttgtaacagcgggatgttttcaacaagccggattctgtataacttaagcaaaacgaaacaggcgccggcaagttttgcgaagctgaataaaaatcatgtgccgagccgcgcgttatggatatcggttattgtgctgtcagcgggcgctcttttaagcaaattgataccggaagcggcctttggcatcgtgacaaccatcagcgcgatctgtttcatttgggtgtggggcgtgattcttgtctgtcatatcagatacaggaaaacccgtccggacttacacgcaagctcgtctttcaaggcgccgtttgcgccgtttatcaattacgccgtgctggcgctgtttgccttcattctggtgattatgctgtttgcggatgcgacgcgcccggctttgctgctgacgccgctgtggtttattggattgtttcttatctatcgggcgagagggagaaagacagattgaattacttcagacggtgtactgccatgcagtatgccgttttaatataaaaaaagcgctatcctgccgtgtaagcagggtagcgctttttacattaattccggatcaaataatcaaatgcgcctaaagcggcagttgcacctgatcccatggagataatgatttggttgtacgggccgtctgtgcagtcccctgcggcaaataggccgggaacgcttgtcgcgccgctcttatcgacgatgatttcgccgatgcggttgcgttcgacggtttcgtctaaccattctgtattaggcacgagaccgatttggacgaatacaccttggagttcaacgtgtttttcttcgcctgtttcacggtcaacgaacgtaatgccgtttacgttttggtcgcctgtgatttctttcgtttgtgcatttttgtgcacagtgacgttcggcaggctgtaaagacgtttttgcaggacttcgtctgctttcagttcaggcgcgaactccagcacagtcacgtgattgacgatacctgcaaggtcaatcgccgcttcgattccggagtttccgccgccgataacggctacgtctttgccttcaaataatggtccgtcacagtgcgggcagtatgcaacacctttgtttttgaactcttgctcaccaggtacgttgacattgcgccagcgggcacctgttgaaaggatcactgttttacttttcagtacagcgccgttttcaagttcaagttcgaagaggtcttttttctcaaggcgtttcgcgcgctgaaggttcatgacgtcaatatcataatctttcacgtgctcttcaaggcttgcagcgagcttcggtccttcagtcgctttgacgctgatgaagttttcgatgctcatggtgtcgagtacctggccgccgaagcgttcagcgacgacaccggtgcggatgcctttacgcgccgtgtagatcgccgcgcttgcgccggcaggtccgccgccgacaacaagaacgtcaaacggctctttgtcggcaaactcagacgcatctgcgccgctgcccattttcgcgagaatctcttcgatggtcatacggccgctgccgaaagattcaccgtttaagaaaacagtcggaacagccatgatgtttttgctttctacttcttctttgaatgccgcgccgtcaatcattgtatgtgtgatattcgggttgagcacactcatcatgtttaatgcttggacgacatcagggcaattgtggcacgtcaggctgatataagactcaaagcggtattctccgctgatgttcttaatctggtcaatgaccttttgatcagccttaggcgctctgccgctgacttgaagcaatgccagcactaatgatgtaaattcgtggccgagaggaacaccggcgaatgtaacgcctgtgtcttctccggtacgattaacgctgaagctcggtgttctgtttaattcagttttttcaactgaaattttagatgacatggaagccagttcgtcaacgagagccagcatgtccttagaagtgtcatcgtcaccggcgcttactttgagaacaatgtcgttctcaattagctgcatgtattgatttaattgtgctttgatatttgcatcaagtaccaatggaatgcactccttagattttacctaccaaatcaaggctaggtgtaagtgtttcgccgccttcttcccatttagccgggcagacttcacctgggttttgacgaacgtattgagctgcttttactttgtttactaggttgcttgcgtcacggccgataccgcctgcattgatttcaactgtttggataacgccatcaggatcgatgatgaatgttccgcggtcagcaagaccagtttcttcgtcaagaacgtcgaagttgcgggagatcgtttgagatgggtcaccgatcattgcgtaagtgattttgccgattttttcagagctgtcatgccagcctttgtgtacgaagtgagtatctgtagaaacagagtatacttcaacacctaattctttcagtgcagcgtattgtccttgaagatcttcaagttcagtcgggcaaacgaaagagaaatccgctgggtagaagcagaaaacgctccattgacctttcaaatcttcgtttgttacatcgatgaattcaccgtttttgaaagcttttgcttcgaatggcagtacttcttttccgattaaagacataatatcttcctcctgaaatgtgatttgaaatatattaaaaagacaaagcattcactttatctttcaataataattctaattatatatagattattaaataacatttattttttgtcaagctatatggggtattattttctgctttttttgctttagacgttaaaaaacgcctggtataagcggtttggcgctgtttgtcatgtttagcgccgggcgaaagggggattctcaattggtgaatcgaaacagtaggaatcaacccctctatatggcagtataaaccaaagggggtatgatcatgcaaataaatcacattactttgtacagttgtgcgttggaggagacgaaacacttctatgaacgggtgttaggttttcctttaattgatgagtccggggattcgtttaccatcaaggcgggagaaagtgagttggaattcaggcgcgccgattctcactctcaaccgacgtatcattttgcgtttaacattccgaataatcgttttgatgaggcgaaggcgtggataaaggataaagtcgtttttcaaacggaagatggggaggatgaggtgtatttctcccatattcaggcgcgttccttttattttaaagatccgtccaacaatctggcggaattcatcgcgagagacacatcgccgccaagcgcggaacgtttttcgattgagtccgttctgaatatcggtgaggtgaatctgacggctgccgaggtggtatcgacggggaaggagctgcagcgtctcggcattccggtgagaaagcatgcgcctcttagtgaaaacgggtttcattttatgggtgattacaatgatggggcgtttttgcttttagggccgagcggccgccgctggattttttctgatcagcatgcggagttccatccgctgtctgtcattgtgaacgggacgatccgcattgaggctgacggagaaggcggcattgacatcaggcgggcacagccgtcataaaaaagcccgggctcaaaaggcccggacttggggacattatttataaacaacccgggtgctgcacatgatgtcgtgcagcgtttttttctctccgaaggcacccatgatgaatccgatataaagaatgagcttggatatgatataggcgaaatgatataggcgaaagcgcgtccgaaggcctggccgatggaaatgcgtccgccatcttcattgacgaccttaaggccgagcaatgcttttcccagggtcccctgcatctttgaggctgtgagcaggctgaaatataagatgctgatcacaatagagctcacaagaatcggaatgacgccgaacaccagaaaagagatgttaaactgattttcggtcatgaaggggtcagccgccgcaacgcctgccgcaaataaaaaagagaccataaattgaatgataaaaatcggaattcctatgatgatttgatcaatgacgtaagccagaaaccgaatccaaaatcctgccggtctttccatgtatctttttctctcccttgctttaatctggaatattatacgtaatcattccggattttgcaatggagcttaagcttctgcgagcagcctctttccccatgccaagcgtcccatgatcagcccgaaagccagaagggcaaacatgatgccgcaccacatcagctgatggattcccaaatgtgaaataaaccagccgcccgccgccgttccgatggtgatgccgaggttggaaaaggagacaaacaggctgttgccgaattcgggcgcctcctttgcttccgcagtaagccatgtctggctgacaatgagaccgccggaatgaacggcgccccatacgaagacgaggacggccatcggcgcgaaagacgtcccaaacccgtatatgagcaagtaggcggctgtataaagaagcggaaacaggatgacggtctttttcatatttttatataacaaagcaccgaagacgaaattcccggctatcataatcaccccgaaactcatcagcatgaagctgacccatgtgccgatcatatgggacacccgcccgaggtactccgcaaaatagctgtagacagaaaacatggccgcaaagagacaggtgacggcagcgatattgagccacaaagccggtttgcgaagaatgccgagctggcttctgaaagacattttttctgtgaccggcatggatggcaaaaagagaagaatgcccgtgaacgcgatgagactgatgatagcgccgaataagaaggcggcttcaagagagagacgatccgccagataagacgtgaaaggcacgccgaacgcaaagccggcggtgatgcctgaaaagactttcgttacggcttttccggattggccggcggggacaagccgggccgcggccgcaagcgctacagaaaagaacaccgggtggcataaagccggaatgatccgaaacgccagcatgacactgaaatgcgccgtatacgcgtagaccgcatttgaaacggcaaacatcagcaccgctaaaagcagaatgtatttccggtttatacctgaagcaagcaaggtcaaaaacggtcccgacacagcgacgatgaacgcgaaaatactgacaagccaccccgcttttgaagcagaaatatgaaatctgtccgccacttgcggaagaacgccgataatgcccatctcggtcgtgataatcccgaaaacccctagtgccaaaaatagaatgaagatggagctgctttttttcattgttatgtatgcctccttttatttaactacatatatagaaaaatagatatgttagaacaaaaaaatccctcctttcatggttatagctggtgctggacatagtcagcaaaggctttaatttgtttttcatttcttctgtaataggtccactttccgattcgttcggattccagcaggccggctttttgcatcgtcagcaggtagctggagatgacggactgcgcaagccctgactttgcctgaatatcaccgacgcaaattccggtgcggaaactgagtccctgatcaagataaggtctttcatcaaaatggtcttccgggtgtttaagccacgtcataatatcacttcgtgttttgttagataacgctttatgaatcaatatcggttccataacgtttattatatctatttttctggatttgtaaattcgtttttgacaaaacattctcaaattaagtaaatatcgtgctaaaatataacatattatcagattaccggtaaaaaagccgggttattgtcaggaggatattcacatgaatcaaaagaaaaaaggtgcggttgcggtgaccttgctttccgctctgatgttttgtttattgccggtcctcgtctcgctttctccgcttgcagaaacggggccgaacgcgaatcgttttaattccgcgggcatgtgggccgccgtcggtcagatccttgttatatatgcggtcccgctcattatgtatattctcggtgttcgtggcatgaaaatcatcatggctgttttttgcgggatcgggcttatcatttgcgcggctgtcttgttggtggcgttattgaccgcaatttccttagggcaggagctgtctctttattacggtcttttcgtttggtcaggcgcggctttcatcgtcaatgtggtgtggtatattgccgcgtttcgatcatccccgaagcatcagcaggctatgtgacatttgttctataaatctaccgaaaatacaaatatttcataggatgattatggtatgatgaaagcggtatagcagtttttaatagaaacgggaggaactgacattgaaaaaaaagacagcttcattgcgaatgaaaacattggcggccggcgctgcggttgctgcggctttatctgtgggggcggtttctgatctgccgggggcaaaatggctgcatccggcggctgctcaagccgcggaaacggtatttaaacaaaatcatgcggcatccggtttcttggcgggacggtatgacgcgcaggcgatgtctccgacgatgttcaactggtcaagggaaagccggtttacaagcactgccgatggcgcgttaaaatgggaaaagaatgttccggccacccctcaaaacggtgcgggagccgcggttgacggggacggcacagtatttattcaatcaaaagacgggaagctgacggcgtatcatccggacggtactgtgaaatgggtgacggaaaacctcgggacgacctatacgctgactccggtgctcggaacaaacggtgtcatttatcttccttctcacgataaaaaactgtatttcatcgacaaagaaaccggaaacattttaacatcggttccgctgagcggagcgccgagttccgatgcggctatcggctctgacggcacgctgtatgtgtcgacgctggataactatatctatgcgattaaaccgacgtcgccatcgacatggacgcaaaagtggaaatttaaaacaaacggcgtggtcggctccgctcccgtgttagcatcaaacggcactctgtatacggcaacgtacaataatatcttttacgcgatcaattccggaacgggccaagtgaaatggtcaaaaacgacgtccaacgggtttaaaggttatccggttattgatagagacggcaccgtttacgccggaaaccaggacggcaacttatacgcctatacatcaacgggtgctgtaaagtggacgttcccgttaaacggtttctccagctcttcattagcgatcgaccataacggcaatgtgtatatcggttcgggaagcggcgagctgttttccatcagcaaaaccggtaatatgaactggtctttctatacggacgggcctgtgagaacggcgccgctgattgatgcggacggcaatgtgtacttcggttctgacgataaaaacgtctatgcggttgacgctgaggggaatgaaaaatggcgctatcaaacagacagcaatgtcatttcctccccggttctggctgaagacggcacgctctacgtcggcacttatacgaaactgctcgcattcggggcaaaaaaataataaaaaagaatccgcgcacgcggattcttttttttatttagaggcttgaatgaatacgcctttttcatgagagaattctttaaaaccgtacacaccgtgatatgaaccgatcccgctcgtattgacaccgccgaacggaaggttgacgtcagtgaaatgaacgacgacatcattgacagaagcattgccggacgtcgtatgctgcagaacataatcgatcagctcctgattatggctgaatacatacaaggcaagcggcttgtcccgttcagtgatgtaatcaacggcttcactgatatcttcgtaattcataatcggcagaatcggtgcgaagatttcttcctgcatgatcttcatatcaggcgtgacgtttgtcagcacggtcggagaaatcgtgcggtcatgagcatcgaatacgccgccgaacgccgtttttgcccctttttcaatggcatcatcatacagggctttgacacggttaaagttgcggtcattgacaatctgcgtgaatttgttgcggtcaaccgtatgatcatcctccataaaacctgcattgacaatggtctgcaggagatctgtaaaggtgtcctgtacatcttccttcataaggagatagtcaggggcgatacatgtttgccccgcattgacaaatttgccgacggcgatttttttcgccgcgtccatcaaatcatagccgctgtcgatgatcgtcgggctctttccgccaagctcaagcgtgacggacgacaaatgcttcgccgctgccgtcatgacgattttaccgacattcgtgcttccggtgaagaaaatgtggtcaaacggctggtcgagcagttctgtcgcgacatcgacctcaccttcaaaaatggcgacttcttcttcgtgaaatgcctcgcgaataactgtcgcggcgatatggctcgtctccatcgtaaaatcggacagcttcacaatcgcgctgtttcccgccgcaatggcagccgcaagcggagccatcgtcagcataaacggataattccatgggccgagaattaaggtaaggccttttggctcgtacattaatacgccgtcagcgtcggggctgacggatgagccgacgcgtttcggcgccatccaggtgtcgagattgttcatattatctttaatcgccttgatcgttccctgcgtttccgctcttttcacctcatgataaggcttgcggacgtcccgtctgatcgcctcgatgatttcttcttcatgtgcggtgacggcatctaaaaagcgctgaagcttttctctgcgctgcccggctgttgaagcacgcagcgttttttgattttttttctgaagcgcaaagacgcgtttgatgtctgcttttatatgctgatccatcggttttcctcctctggttgcttttttatttcttcagggcctattataatgtgatgtgtttttgcggcaaagacagcgtaaacgcatctatacgttaccgtacaaattgccgtgatctgtctaatgaaaggagtgtctcttatgccggattctatgacaaatgacatcaaacaagcgcttttggccatgcttggagagcgggatatccgccgtgtgaccatgaaggacatcgccgaacgggcgcacgtgagccgggggacactgtacctttattacgaagataaatatgcgattttagaggatatagaggaagaaatgaaagacgggctgagcgaagcgctgtatgattcgctgaagaataaagatgtgcttcatttacagggcggatggcaaaaagtgcatccgacactgtcttttgttgaccggcaccgggtgttttttcaaacgatgatggaccgtcataaaatgccgtattttcacgttcatgcttttttaaaagatgtgttccggcatgatgtgctgctgtcaccggtcaatgcggatttctcaccgactgaacaggatatgtacattcattaccgcgcgttatacacatatgccattgtgttgtactggctgaatgaggagcccggggcatccccggaagaaatcagcggacaggtgtgggatttgatttctcaaaaacggttttactggctgtttggccgccgggtgccggaacaagaagaaaaaaagcccgccgaccgccgggtgacaaggacgaggcaggccttgcaagaagccatgatcggcttaatggcggaaacaaaagagtacgcggcgatcacgatttccgatattgcccgtcaaagcaacctccgccgtgccactttttatgaccattacgccaacaaagaagcattgctgaaaacgatcatccatcaatcatgccgggatctgatcggattattgacggtaaaaggagatcctgccgactgttccgtggaagaagcggaagccgcgctcgtccggctcttttcggcgctgtccggcggccttccgctcgttcattttctgagagagggttcaggagtgcctgacgtcatcccggaaatgttcagagcgctgcaatcgttttatcttcatcagcctctgcacattcaggcgggcaaaaagctctatgcatactatgtcgcgtccatgctcgtcggtctgattcaatatcgtcttcatgaaggaaaagaccacgcgccggatatgctggcccgggagtttctgcagtttttggatgtgaagaagtatcgggtgattttgctgtgaggatgatgaaaaagaactcggccgaaaacaggccgggttcttttttgctgttttctttgagaagtgcagatatgaaagaaaccttccatatgacgcctgattagcattctgccgccaaacatgacaaatgtcatattcggggcatgatggctgctactacaaccgcgtcgggcgccccgttatacttgaggtcataatgaaaaagaagggacatgacattcatgatcaatcacgccgcaactcaaaaacaagcgtctttaaaaaagcaggttgccgcattttccggcgccgatacaaagcatagtatcattcagcttttcaacacgtttgtgccgttttttgccctttggtttcttgcttacttcagcctcaatgtctcctatcttctgaccctcgcctgtactgttatagcagcgggatttttgacaagaatctttattattttccacgactgctgccaccaatcctttttcaaacaaaagaagctgaaccggctgttcgggtttatttcaggtgtgctgacactgtttccgttccttcaatggcagcgaagccactccattcatcatgcgacaagcagcaacttagataaacggggcaccggcgatatttggatgatgaccgtcaaggaatataacgaagcgtcagcctggacaaaaatacgctacagactttatcgcaatccgtttattatgtttattctcggcccgatttacgtatttctgattaaaaaccgtttcaatgtaaaaggcgcccgccgcaaggagcgctggaacacctatttcacgaacgcggcgattgtcttattggctgctgcgacgtgcttgcttctcggctgggaaaactttttgcttgttcagggtccgattttccttatttcggggtcaatcggcgtctggctcttttatgttcagcacacgtttgaggattcttattttgaagccgatgagcattgggattatgtgcaggccgcggtagaaggaagctccttttacaagctgccgaagcttttgcaatggctgacgggcaatatcggctatcatcatgtccaccacttaagtccgaaggtgccgaactacaagctggaagccgctcatgagggacacgagcctttaaaaaacgtaccgaccattacgcttaaaacaagtcttgaatccatgaaattccgtctgtgggatgaggacgaaaagcagtttgtcaccttccgggaggcgcggaaaacatcggcgccccatccggtgccgaaagaacctttaaagaaaaatgcctgatacggcgcacggctctttctcttatcagaaagagccttctcttcatgcgtgagggtgcaatgaaggcggtgttttgataaagtgatggtagacacaagcagcagaaggtggaacaaagatgaagaagtattttaaatttcaaaaactgaacgggatttctccttatatatggacgatttttttcatcctgcctttttattttatttttaaaagctcttctaccttcgtcatcgtggccggcatcattttcacgctcgttttctttggcgcataccgctttgcatttgttgcaaaaggctggccgctttacttatgggcgcttcttctgatcggcatttcgaccggctcagccatgctgttcagttatatttatttcgccttctttattgcctacttcatcggccatatccgagacaaagttccattttacatcttatattacattcatatcatcagtgcggcggttgccgtcaacttcagccttgttctgaaaaaagaatggtttttgacacaaattccgtttatcgtcattacactgatcagtgccatcctgcttccgctcagcattcgaagcagaaaggcacgggagcgccttgaggagaaattagaatatgcaaatgagcgaattgccgatcttgtgaagctggaagaaaggcagcgcatcgcccgggaccttcacgatacacttggacaaaagctctccttaatcggactgaaaagcgaccttgcccgaaagctgatatataaggaccctgaacaggcccgcgctgagctgaaaagcgtgcagcagacggcccgcacttccttaaatgaggtcagacaaatcgtctcatcgatgaaaggcatccgattgaaggatgagctcggcaatgttcggcaaattcttgaagcggcaggaattgaatttgtgtatgaagaaaaagaagcgcccaaacatatctctttgctgaacgaaaacatcgtcagcatgtgcattaaagaagccgtcaccaatgtcgtgaaacacagcggcgccaaagtatgccgcatcaccattcagcagctttggaaagaggttgtcattacggtagaagatgacggaagctttcaatgcagagaagaccgctttttttcaaaggggcacggcctgcttggaatgagggaacgtcttgaattcgcaaacggcagtttagccatcgatacagccgccggaacaaagctgaccatgagaatcccgaatgattcaaaatcaaaagaaaaggatggtagcagatgatcaacatcttcattgccgaggatcagcaaatgctgctcggcgcactcggttcgctgttgaatttagaagaggatatgacggttgtcggcaaaggcacaagcggccaggatgccatcgatttcgtggaaaaacatgcgcccgacatctgtctgatggatatcgaaatgcccgggaaatcaggtcttgaagcggcagaagaactcaaggacagcggtgtgaaaatcatcattttgacgacctttgcccgctccggctattttcagcgggcgctaaaagcaggcgtcagcgggtacatgctcaaggacagcccgagcgatgagctcgtcagcgccatccgcagcgtcatgaaagggagacgcgtctatgcacctgaattaatggaggacatttatagtgaagaaaacccgctgaccgaacgggaaaaagaggtgctcgagcttgtcgcagacggaaaaaacacgaaagaaatcgcaaacgccctcagcatcaaaagcggcacagtccgcaattacgtttcgatgattctggataaactagaagtgaaaaatcgaattgaagccattacccgatcaaaggaaaagggctggtttaagtaacccgccctcagcttgttcagccagtgttttttttacactggctttttttattatctatcgtcactccgtctcttccttccacttcttatcaatcagcattttccccggccaagtgtatgccatgatgccgccgtctgcggtgatgtcttctcccgtgacgtaagagctgtcgtctgaagcgaggaagagcgcgacagccgccatttcttccggttttccgagccggccgagcggcgtgatccatttgttggcttcacggaacgcctcgcccatttcgtcttctttcgtgcctgccaatttatcaatgagcggcgtttcaattgtacccggcgataaggaattgacgcggattccgcttctggcgtaatcaatggccatcgctctcgtcaggttcgtgattccgccttttgcggcgttatagccggaacggtcaaggtctgcggcccggccggacatggaggaggtgttgatgatggagcctcctttttcgagcatgagcggaatcaggtatttgctgcacagaaatgtgccgcgcagatcgacggcgatgatccggtcaaacaggtcgaccgggtattcatggacattgccgccctcttggtcaacaccggcattgttaaacagaatatcaattgttccgtacttttgctgaatgccgtctgcaaaagactttacgttttcttcatctgatacatcaaggtgaaaggcttctgcttctccgccgttttttctgatggcgctgacggtttcattcagttcgctttcattgatgtcaccgcagatcacgcgggcgccttcatcggcgaaaacccgtgccgtcgcttgtccgatgcctgtcgcggcccctgtgatgattgcggttttgtctgttaatcttcccatattgcgattcctcctttttctatacctgttcccgctgaatagggggataaacatacggaggtttgtttctaattacctattaaatatgttaatattatgtatatacatcattgggaggtttacatattttgaagatacagcataagaaggagatagcgttttattgttatgccattgttcctatgggatttgtgatctacaccgttatctctattctgtttcaggacatcacgtttcctctcactgtaagaaatgttctgcatgagtctttgcgaaacttgggatctcttatcttatttagtttgtttttctacccgtcatacatatggatgaagaaggaattcggccgccggaaagaagcagagaggagaggatgatcaacattctctcttttttattgataaaatgggtgaaatgaatccattaacatgttaaatttacaatatatgcatctgctaatcctagttgacaattgtcactgtatatgataaatagatgctgaaaagattttacataacatcaaagcataattaaaggagagatctgaagtgcggaaaaaaaagtttaaagcagaatccaagcgattgctggacatgatgattaactccatttacacgcagaaggaaatttttctccgcgagttaatttccaacgcgagcgatgcgattgacaaaatctattacaaggcgttaaccgatgattcattaacgtttgatcaagacaattactatataaaagtgacggcggacaaagaagcgagaacgcttaccgtcacagataccggtatcgggatgacaaaagacgagcttgaacagaatctcggcacgattgcgaaaagcggttcactcgctttcaagcaagaaaatgactcgaaagacggccatgacattatcggccagttcggcgtcgggttttatgcggcgtttatggtggctgataaagtcacggtgaaaagtaaggcgctcggcagtgacgaggcgtatgtatgggagtcggaaggggccgccggctacacgatcgcgccgtgtgacaaggaaaccgtcggtacggaaatcaccctgaaaataaaagaaaacacagaagatgaaagctatgatgagtttttagaaaactaccgcatcaaagcgatcgtgaaaaagtactctgattttatccgctacccgatcaaaatggaagagacggtcaacaagccgaaagagggcagcgagaacgaatttgaagaagttcaggaagaacagacggtcaacagcatggttccgatctggagaaaaaacaaaagcgagctgacggatgaggattacgaggctttttacgccgagaagcattacggttttgataaaccgctgacccacgtgcatatcagcgtcgatggagcggtgcgctacaattcgattttgtttattccggaaaacatgccgtttgactattatacgaaggaattcgaaaaaggattggagctgtattccaacggcgtgctgatcatgaacaaatgcgccgacctgcttccggatcatttcagctttgtaaaaggcatggtggattctgaggatctgtcgctgaacatttccagagagatgctgcagcacgaccgccagctgaagctgattgcgaaaaacatcaataaaaaaatcaaagccgagctgaagagcttgctgaagaacaaaagggaaaaatacgaatctttctatgaatctttcggcagacagctgaaattcggcgtctataatgatttcggcgcgaataaagacgtcttaaaagatctgcttctcttctattcatctaaggagaaaaagctcgtcactctggacgaatatgtgtccagaatgcctgaggatcaaaaatatatctattacgcgtccggcgattcatatgagcggattgaaaagctgccgcaaactgaaatggtggcggacaaaggctacgaaattttatatttcacggaagatattgatgaattcgcgatcaaaatgctgacaagctacgaggaaaaagagttcaaatccgtctcaagcgccgacttaggcatcgacagtgacgaagatgataagcagactgaagccgaagaaaacgaatataaagacctgttcgaaagcatgaaagagattcttgcggataaagtcaagaatgtcagagcctcaaaacgcttaaaatctcatccggtctgctttgcgacagacggcgaagtgacgatcgaaatggagaaagtgttaaacgccatgcctgacagccagcaggtcaaagcggaaaaagtgctggaaatcaacccgaatcacgaagtgtttgagacgttaaagaacgcgcacggacaagatcgggaaaagcttgctttatacacaaacctgctgtacaatcaggcgcttctgattgaagggctgccgatccatgatccggtcgagtttacgaatgatatctgcaaagtcatggtatgacgccaaaaaggaatcgcccagcggggcgattccttttttgattacagtgtgcgctgtttaagaatttgattttgtttgctgcgcttctttaaggagaaccgttttttcaagtgcgtttcgatttcttctaaacttttgcccttcgtttcaggaacgatgtaagcggcaaagaagaaggatgtaaggcagatgactgagaatattccgaacacccagccgatgcccattgcgctcagcataagcggaaataccagcgaaacgatcaggttggttgccgacagaatcaatgtcgtaaatccggttgcggctccgcgtgcgtttgacgggaacagctccggcatcagaacccatacgacgggaccccatgtcgcctgataaaagacgatatagattccgagaaacagcacggtcagccaagctgttgaagctgacaggccggccagaaggagaatggctgatagtgacgccaggctcaaggtaatgccgacacttccccacatcagcagttttttccggccgatccggtcaattaagatcatggcggtgatacacatgatgacgtttaagacaccgatgcccatcgtgccgagaacggacgccgaagtgccgagtccggcctttgtaaagatggtcggcgcatagtaaatcaccgtgttgataccgaccgcctgctggaagatggcgaggccgatcccgatcagcagcataggacggatccattttgctttcagcaagccgagcgtagattcttttttctcggcttctccttgtttcatttccgccaattcaacggcgatatcctctttgtcgtgagtcatttccatgacttgtctggcttcctgctcacggccgcgtttgacgagccatctcggagattccggcataaacgcgattccgattaataaaagcgccgccggtactgccgcgagaccgaccatccagcgccaagcttcaaacggggtgaatatgtaattcacaatatatgcgagtaaaattccggttacaatcattaagttattcaatgtgccgagcgttccgcgtatttttgtcggcgccatctcagatagataaacgggaaccagcgccgttgagcctccgacggctaacccgagtatgacacgggagataatcagcatggtgacggtttgcgaagccgcacaggcaagcgcgccgataataaaaatgagtgaaaggacgaaaaccacttttctccggccccatcggtcagagcatgtcccgcttaaggcggacccgaaaatcgcaccgagcagcagcatgctgacgaccaatccctcggtcagcgtgtttaaaggaatatcattgttaataaataacaaagcccctgaaatcacaccggtgtcatagccgtaaagcagcccgcccaatgctccgaaaaagtaaatcaggtattttttggtgtttttcttcacagatgatcctcctcatcttttggaacgcataatagtttatttagataactatttcattccccgaagagaaaaatataaacataaaaaaacacgccctttcaaaaaggcgtgttatttttcttaggaaaacagcttgtcaataaacgcgatttcttcagcagatagcgtaatggaggctgctttcatgttgtcttttaattgatccgcgcgtttggcgcccggaatcaggatatcgatttcaggtctcgccaagtaccaggcaagcacgatatgcgccgtatcggcattgtgcttttcagcaatcggtttgagctggttgacttttttgatgttttctttaaactgctccccttggaaatgcgcctgatcattgcgcaggtcgccttccgggaaggttgtgttctcgtcgtatttgccggccagcagtccggatacgagcgggaagtacggaatgaatgagatgccgtgttctgtcgtataagggaagaaagtcttttccgcctcacggttcagcaggttgtattctccttgaatcacgtcgactaagccgtctttattagcttctttcagctgctccaaagagaaattggatacgccgatggaacggatttttccttcttttttcagctcattcaatgcttgaacggcttcgtccttcggtgtatgctcatccgggaaatggatgtagaataaatcgatgtaatccgtctgcagccgtttcaggctgtcttcaaccgattgtttcaaaaaggccggtgagttgtcgaaaacaaagtcattgccttcttttctatgagcggcttttgtggcgatgaagacatcctcgcggttatattctttcagcacctcgccgatcaattcttcagaacggcccacaccgtaaatataggcggtatctaacatggtaacgccgcttttaatcgcttcccggaccaattcttttcccgtttcttcattcagattcggatagagattgtgtccgccgaccgcatttgttcccaaaccgatcggaaatacctttaggtcagttttgccgattgttactttgctcatgttttcgccccctgaaaaaattggatatcatagcgcctgccgggaaaatacggcagcgttctctattaactataacgctatgccaagtgaatgtcgatttggtgctcttggcaatacttcgtatattcctcatcgagctgctgagaagtgacgatgctgtgaagccggtcaaaaggcgcgtatgtcaaaagcgtggatttgccgaatttggaatgatccgcgagcagatacacttcgttcgccttttcggaaattttctttttcacctcgtattccagtaagtcggaattcgtcaggccgtgggtgatcgttgtcccggtagcggacatgaacgccttgttaatgttgtatttattgagtgtgcccggatcatcaatgccgacaaacgaccttgtcttccgtttgtagttattgccgatgatgatcaggtcgatatttttcatggatgaagcggcgttaataatatcaaggctgttcgtcaacaccgttacattcttatccgggtcaagcgtctccagcatcgatttggtcgtcgtgccggaatcaataaatacaagatcgtgatcctcgataaaccgcgacgcatagcgggcgattttgattttttcatcctgatgttgaatggtgcggttctcaaaagggacgagcacagatttttctgctgacgtcacgccgccgtacacctttttgatcacccctttttccgcaagcttattaatatcgcgtctgaccgtgtttttagagacgttgaatacctcgcacagctcatccagcgaagtggctccgtgtttgagaatgtattcttccatctcctgaatccgcatcagtttcataaaaaaactccttctagaattcttaaagtaattaaaatatataataaacaccaagagttaatcaatagttacttaacaaatgataaaaaagagggttcccaccgtacgattcgacacggttctccaagttcctgttttcccgcttaaaaaaagtatgataaaaataatgaaaaaattttgattttttagattgacttgaaggtgtgttgggcttacaatgtaaccaagaaatgaccaaaatataacctgtaaaatcaaaagtgaaagatgtaaccgtttgctttatccggcacatgaccaacttttacatgaaaagattgggagtcaccatcattttagcatttgtaagcgtttaattcatgtcttttatatgtaaaagatgaatatattcatccgttattatccagctgaacaggatgtttactatttaaggaggcaatgagaatggcagagatcagaaaactgaaaaactacatcaatggtgaatgggttgaaagtaagacagatcaatatgaagacgttgtcaatccggctacaaaagaagtgatgtgccaggttccgatttctacgcgggaggatgtggaatacgccgtccgctcagcgtcagaagcgtttaaaacatggtcgaagacggcagtgccgcgccgtgcgagaattctatttaactatcagcagcttctccagcagaacaaagaagagcttgcccgtctgatcactttggaaaacggtaaaaacacgacagaagcactcggtgaagtgggacgcggaattgaaaacgtcgaattcgcagcaggcgcgccgtcactcatgatgggcgattcacttgcctctatcgccacagatgtagaggcggcgaattaccgctatccgatcggggtggtcggcggcatcgcaccgttcaacttcccgatgatggtcccgtgctggatgtttccgatggcgatttcgttaggaaacactttcattctgaagccttctgagcgcacgccgctgttaacggaaaaactggcagagctgtttgaacaggccggtctgccgaagggcgtcttcaatgtcgtgcacggcgcgcatgacgtcgtaaacggcattcttgagcatccggagattaaagccatctcattcgtcggttcaaaacctgtcggcgagtatgttttcaaaaaaggcagcgaacatttgaaacgcgtgcaggcgttaacgggcgcgaaaaaccatacgatcgtgttaaatgacgcccaccttgaagatacggtcacaaacattatcggcgcggcattcggttcggcaggagagcgctgcatggcatgcgcggttgtgacggttgaagagggaatcgccgatgagtttatggcgaaattacaggaaaaggccgcagacatcaagatcggaaacggactggatgacggcgtgttcttgggcccggtcatccgcgaggacaacaaaaaccgcacgcacagctatattgaaaaaggcatcgaagaaggagcgaaactgctttgtgacggccgtgaacatgtaacggaagacggctatttcgtcggaccgacgatttttgacaacgtgacgacggatatgacgatctggaaagatgagatctttgcgcctgttctgtcggtcatgcgtgtgaaaaatttaaaagaagcggttgacatcgccaaccagtctgaatttgcgaacggcgcctgcctgttcacgtcaaatgcgaacgcgatccgctacttccgtgagaatattgacgcgggaatgctcgggatcaaccttggcgtcccggcgccgatggcattcttcccgttctcgggctggaagtcttctttcttcggcacattgcacgcaaacggaaaagacagcgtcgacttctatacacgtaaaaaagtcgtgacggcacgatacccgtctcctgacttcaattgatcagacagccggcccggacggctttgtgattccgtccgggttttcttttaccatccattaaggaggaataaacatgagtcatttgctgcgcaaaccgcaggccgatgaaatttctcaaggcgtgaccatcatacatgacgtcacttcagccaattcagacctcaaatacgtcggatttaaagtcgttgatctcgctcccggctcaacctatacagaagatttgaaaaagacggagtgctgcatcgttgcggtaactggaaaagttaccgtcactgattatgatcagacatttgaaagcatcggcacccgtgaaagcgtatttgatagaaaaccgacggacagcgtttatgtgtccaatgaccgctcttttggaatcacagccgtcagcggggcgagggtcgcgctgtgctactctccgtccgaacaccagcttccgacaaagctgattaaagcggaagacaacggtgtggaacatcgcggcaagctggcaaacaaacgaaccgttcataacattctccccgattcagatccatcggcaaacagccttctcgttgttgaagtttacacggacagcggcaactggtcgagctacccgcctcataaacatgaccaagacaatctgccggctgaatcatttttagaagaaacctattaccatgaaacggacccgccgcagggatttgtcttccagcgtgtgtacacggacgaccgctcgattgacgagacgatgaccgcagaaaatgaaaacgttgtcatcgtgccggcgggctatcacccggttggtgttccggacgggtatacctcttactacatgaatgtaatggcgggaccgacacgaaaatggaagtttcataatgatccggcccatgaatggattctggaacgctgacaagtgaggagtggcagataacgatgaaatatacgtttaatgaagaaaaagagtttgatattgtcgcgatcggacgcgcgtgtattgatttgaacgcggcggaatacaaccggccgatggaagaaacgatgacgttttctaaatatgtcggcggctccccggcaaatattgcgatcggcagcgctaagctcggattaaaagccggttttatcggcaaaatcccggatgaccagcacggcagatttatcgtttcttatatgcaggaaaagggcgtcgatacgtcacaaatgaccgttgacagagaaggacgcaaagccgggctcgcttttacggaaattctcagtcctgaagagtgcagcattctgatgtaccgggatgacgtggcggatttgtatctagagccgtccgaagtcaatgaaggctacatcgcaaacgcgaaaatgctgctcgtatcaggtacggcgcttgcgaaaagcccgtcgcgcgaagccgtcttaaaagcggtgcaaatcgcaaaaaaacatgacgtaaaagtcgtgtttgagctcgactaccgtccgtatacatggcaatcggcagaagaaacagccgtgtactacacgctggcggcggaacaatccgatatcgtcatcggtacgcgtgacgaatttgacgtaatggaaaaccgcagcggcggaaataacgatgaaaccgtccgccatttgtttgcgcactccgccgaccttgtcgtcattaagcacggcgttgacggatcatacgcatacagcagatcgggagaagttttccgggcgcacgcctataaaacaaaggtgctgaagaccttcggagcgggtgattcctatgcgtcagctttcatctacggactggtcagcggccgggatattgaaacgtcgttaaaatacgggagcgcttccgcttccatcgtcgtcagcaaacacagctcctcagaagcaatgccggctgccggtgaaatcatcgaactgattgaagcgcagcacagtcttaacggtaaatagaacgtataaaaggtgggatcgtttgtgggtaagacaattcgcttaacgacagcacaagcgctgattcaattcttgaaccggcagtacattcatgttgacggaaaagaagagccgttcgttgagggcatcttcacgattttcggccatggaaatgtgttggggatcgggcaggcgctcgagcaggacgccgggcacctgaaagtctatcaaggcaaaaacgaacaaggcatggcgcatgccgcgatggcatacagcaagcagatgctgagaagaaaaatttacgcggtatcgacatcggtcggtccgggtgccgctaacttgacggctgccgcgggtacggcgctggccaatcatatcccggtgctgctgcttccggccgatacctttgcgacgaggcagcctgacccggtgcttcagcaggtggagcaggaatacagcgccgccgtcacgacaaacgatgcgttaaagcccgtgtcccgctattgggaccgcatcacccgccccgagcagctgatgagcagcttaatccgggcatttgaagtgatgacagatccggcaaaagcgggcccggcgaccatctgcatttctcaggatgtagagggagaagcatttgattttgatgaaagcttctttgaaaaacgtgttcattacattgatcggatgcagccgagcgagcgtgagctgaaaggcgccgcggagagaattaaggagagcagccgtcccgtcattttagtgggcggcggcgcgaagtactccggcgcgcgtgaggaattaatcgcgctttctgaaacatacggcattccgcttgtcgaaacgcaggccggcaagtcaacggttgaagccgattttgccaacaatctgggcggcatgggcatcacgggcacacttgccgcaaacaaagccgcccgccaggctgatctgatcatcggtgtcggcacacggtacacggactttgcgacatcctcgaaaacggcgtttgattttgacaaagcaaaatttttgaatatcaatgtcagccgcatgcaggcatacaaacttgacgcgtttcaggtcgtagccgatgcgaaagtgacgctcggcaggctgcacggcttattagacggatataaaagtgcattcggcacggcgattaaaggctggaaagatgaatggctggctgaacgggaccggctcggcaaggtcacttttacacgtgacgcgttcaagccggaaattaaaaaccatttctcacaggacgtgttaaacgagtatgccgacgcgctcgagactgagctgccgcaaacaacggcgctgttgaccatcaacgacacgattcctgaagacagcgtcgtcatcagttcggcgggatctcttccgggcgatctgcagcggctgtggcattccaacgtcccgaatacgtaccatctggagtacggctattcctgcatgggatatgaagtatcgggcacgctcggcctcaagctggctcatcccgacaaagaagtctattcactcgtcggcgacggaagctttctgatgctgcactcagagctgattaccgcgcttcaatataacaaaaaaatcaatgtcctgctctttgacaactccgggttcggctgtatcaacaacctgcagatggatcacgggagcggcagttatttctgcgagttccgcacagaggacaatcagattttaaacgttgattacgcgaaggtggcagagggctacggcgctaaaacatacagagccaatacggttgaagaactgaaagcggcgcttgaagatgcgaaaacgcaagaggtatccactttaattgaaatgaaggttctgccgaaaacgatgacggacggctatgacagctggtggcatgtcggcgtggcggaagtgtctgagcaggaaagcgttcagcgggcatacgaagcgaaagagatgaagctgaagtctgcgaagcagtactagaggggaggcatcacgatgggcaaacaaaatattttgtggggcatcgctcccattgggtggcgcaatgacgatatgccggagatcggagccgggaatacgctgcagcatttgttaagcgatattgttgtcgccggttttcaaggtacggaagtgggagggtttttccctgaaccctccgtcctcaataaggagctggctctccggaacttgcggattgcggggaaatggttcagcagctttatcattcaagacggtattgaaaaaacggctgaacaatttacagaacactgtgattatttgcagaaagtcggagcggatgccgccatcgtttctgaacagacgtacagtgtccagggcttggatattgatgtatttaagaaaaaaccgcacttctcaaatgaagaatgggatacactgtgccaaggcttgaaccgtctcgggaaaatcgctgacgaatacgggctggagctcacgtttcatcatcatctcggcacaggcgtccagacggcggaagaagttgaccggctgatggatggaacggacccgcggtatgtccatttactttatgataccggccatgcctatatctcagacggagactatatgacgattctcaacaagcatatggatcggatcagacacgttcatttcaaggacgcgcggtttgacattatggagcggtgcagacaggaaggcaagtcattcaggcagtcgtttttacagggcatttttacggtgcccggagacggatgcatcgattttaccgaagtgtaccaaacgctcgtccgtcatgattattcaggctggatcgtcattgaagccgaacaagacccggcagtcgccaatccgcttgagtacgcgctgattgcgagaaagtacatcgacagtgaactgcttgatcctgcaaattagagggggacttatatgaatagtgccaaggcggaatcagctttcagcaaacggaccatcgccgcagcattagcaaattacattgatgcaggttccatcgtggcaggatcagcgggtttatctatgtgggtcagctacttgaagctgtccgacagtcagatcggattgctcggcgccttcagcgcaaacgcgatatcagcggccatcggagcgctgctcggcgggtatttggctgataaggtcggccgaaaagctgtatacacaaacagtatgctcgtctacgctttaggaatttgtttggttttgtttggattcaactttcccatgctgttatgcggatacatgattatcgggatttctgtaggcgcggatattacggcttcatggaccattatcgcggaaaacgcccccgagaaaaaccgggcgaggcattgcggagtggcgcaggtggcgtgggccgccggagccgttgtggttctgctgttatccgttttggtcggtgacctcgggcttttaggaaataaaattgtctttgcgcatctattggtgatcgccctgatcacatatgtgataagaaagcgtttacctgagtcggatgcctggaaaaacagtgaagagcggcctgccgccgtgaaaaaaacatcttattttgacttgcttcagccgaaatttttcaagaacattttgtttttaatgggtgtgtttctcgtatggaatctcgccgcgggcgtcatgggattcttcatgccgtacatctaccagcaggtcggcggcgtatccgcaaatacggccaacattctgcagatggccctgtttatcttcaccgggctcggcgtcgcctgtatcttcatgccttttgcagatcaatatcggaaaacggtgttcggaatctgcgcctttatggctgttgtcggctggtcgctgtttttgctgccgtttcagggactcccgatgctgcttttgtttgttttagcgatcggcatcaataacggagccggccagcaggcgaactaccagctgtgggcaagcgagctgttcccgacagaacacagagcgtcagcacaagggctcatgttctttctcgtccgtatttcaatcggcatttggagtttatttgtgccggtcatcatgtcacaattcggcatcggttttatggccggtattctgctcatatgtgtgacggccagtatgatcatcgggcttgtcttcgcaccgaatacgtccggcaagtcgcttgaacagatacaggaggaactgtacggtgctcctcaggacggcagagagaaaagaaagacgagaaccattatttgattatcagaaggagtggcgatcaatgaatttacgtataggtgttatcggaaccggtgctatcggaaaagagcacatcaaccgcatcacaaataagctgtcgggcgcggaaattaccgctgtcacagatgtgaatcaggaggccgcgcagcagaccgttcagcatttcaatttgaacgcctcggtttatcctgatgacgacagccttctcgctgctgaaaatgtggatgccgtcttagtgacaagctggggcccggctcacgaatccagcgtgttgaaagcgattcagcacggcaagcacgtgttttgtgaaaagccgcttgcgacaacggcagaaggctgtatgcgcattgtcgaggaagaaatgaagacgggaaaacgattggtgcaggtaggtttcatgcgcagatatgacagcggttacgttcagctgaaagaagcgatcgacaaccgtgcggtcggcgagccgctgatgattcactgtgcgcaccgcaacccgacagtcgcatcgaattattcaacggacatggccgtcgtcgatacgctcgttcatgaaattgatgtcctccactggcttgtcaatgacgactatgaatccgtacaagtcatctatccgaagaaatcaaaaaatgcgctgccgcatctgaaagatccgcagatggtcatcatcgaaacaaaaggcggcatcgtcatcaatgcagaaatctatgtgaactgtaaatacggctatgacattcaatgtgaaatcgtcggggaagacggcgtcattaagcttccggaaccgtcaagcatcagcttgagaaaagaaggaaaattcagcaccgatattctgatggactggcagcgccgatttgcggctgcgtatgatgtggaaattcaggacttcattgattcgatccggaagaaaggcgaagtcagcggtccgacggcatgggacggttatattgccgcggtgacaacagacgcgtgcgtaaaagctcaggaatccggacagaaagagccagtggcgcttcaagagaaaccggcattctatcaatcatttacgactgtgaacaaataatagatcgggagtgaaaaaatgaaactggccttagatccatccatgtaccgcgatgatttaacattagaggaaatggtctataaaacggcggaactcggatacgaatatatcgaactgtccccgcgcgaggatttttgtcctttctataaatatccgaaagtcgattcagcaaaaatcaaacaattgaagcgccttttaaaggatacaggtgtgaagctgtcctcccttcttccgctttaccactgggcgggtcctgatgaagaccgccgccaggccgccgtgcgcaactggaaacgggcgatcgaaattgcggttgaacttgaagtggatttgatgaacagtgaattcagcggttcaaagtatgatccgttgacaagtgaagaaaaattcatcaaatccatggatgagctgctgcccgtctttgaaaaagaaggcgttaaactcaatcttcaagcccatccatacgattttatcgaaacgcacaaaggtgcgatggatatgatccgcgcgctcgataaggattggatcaatcttgtctactcgactgcgcatacgttcttctatgatgacggcaaaggcgatatcgaaaccatgtttgatgaagccggcgaccgcctcacacatgttttatttgcagatacttttaatcataaagcggcgcacggcctgcgttacatcgtcaatccgcctgatgcgaaagtaacggttcaccagcatctggacatcgggcaaggcgaggtcgattttgagacgattttcagaaagatgagagagatgaaattcgacggaattgcgacgaacgccgtgtttgcttgggtcggcgaaagagcggatgaatcaagccggaccacgcttaagaaattaaaggaagaactgggtatggcataagctgagtatggagttcggcggagcggggcaaaaaagcccttcagccggactcccttcatatcgaaaacgcggatgggagaggctgacatgaaactttgctttaatgaagcgactacgctggagaattcaaacctgaaacaggatttagaactgtgcgaaaagcacggctatgattatattgaaatccgcacaatggataagctgccggaatacttaaaagaccattcactggccgatctggcggaatattttcatacccatcatattaaaccgcttgccctgaacgccctggttttcttcaacaatcgtgatgagaagggttatagggagatcatttcggaattcaaaaaaatgatggaaacctgcaggacgctcggcgtgaaatatgtggtggccgtgccgcttgtgacagagcggaaaatcttgaaagaagaaatcaaaaagagcagcatagaggtgctgactgagctttcggacatcgcggagccgtacggcgtaaacattgcccttgaatttgtcggccacccgcaatgcacggtcaatacatttgaacaggcgtatgacatcgtgaacgctgtcggccgcgataatgtcggactggtgtttgacagcttccatttccacgcgatgggctccaatattgagagcttgaagcaggcggacggaaagaaaattttcatctatcatatcgacgatacagaagactttccgatcggctttttaacggatgaagaccgcgtctggcctgggcagggtgcgattgacttagacgcccatctgtcagcgttaaaagaaatcggattcaatgatgttgtctccgtagagctgttcagacctgaatattataagctgactgcggaggaaacgatcaaaacggcaaaggaaacaacggaagccgtcgtatcaaaatacttcatgaaggaggcgtgaacatggcttttgtcaccatgaaacatcttcttgcagaagcgaaacgggagcattatgcagtcggccaatttaatatcaacggcctccaatggacgaaggcgattctgcaagcggcgcaaaaggagcaatcgccggtcatcgccgcggcttccgatcgtctggtcggctatttaggcggatttaaaacgatttccgccatggtcggcgcgttaatggaagaaatggcgattaccgttcccgtcgtgctccatcttgatcacggaagcagtgcggaacgctgcagacaggccattgacgccggattcagctcagtgatgattgacggctcccatcagccgattgacgagaatatcgcgatgacaaaagaagtcaccgattatgccgcaaagcacggcgtctcagtagaagccgaagtcggcacggtcggcggcatggaagacggacttgtcggcggggtctgttatgccgatatcatggaatgtgaacggatcgtgaaagaaaccaatatcgacgcgctggcggccgccctcggctccgtccacggcaaatatcagggcgagccgaatctcggatttaaagaaatggcggctatctcccgcatgactgatattcccctcgttctccacggagcatccgggattcctcaggatcagatcaaaaaagccatcacgctcggccacgcgaaaatcaatatcaacacggaatgtatggtagcctggacagacgaaacacgccgcatgtttcaggaaaacggcgatctgtacgaaccgcgcggctacatgacacccggccttgaagccgtggaagagacggtgcgaagcaaaatgagagagttcggatcagccggtaaagccgtaaaacagcagatcggctgatgaaaacggaaaccgccaagatggcggtttttttgtgcggtgttgcgtccgtacgcccgaaacgattatgatgatggcagcagtgtaagaaacgggagtggttcagtttgaataaaatcatgattgtggaagatagtgaagacattcgcggactattgcagaattaccttgaaaaatacggatatcaaaccgtggccgccgcggatttcacggctgttcttgatgtctttttgcgggaaaagcctgatgtggtgctgcttgatatcaacctgccgtcttatgacggctattattggtgccgccagatccgccagcattctacaagcccgatcattttcatctcagccagaagcggggaaatggatcaggtgatggcgattgaaaacggcggagatgattatatcgaaaaaccgttttcttatgatattgtgctggcgaaaatcaaaagccagatccgcagggcatacggagagtacgccgccaagcagggagagaaagtggttgaatatgccggtgtgcagctctttgtggaacggtttgaactgcgctttcaggacgaaaaaagcgagctttctaaaaaagaaagcaagcttttggaagtgctgctggagcggggagaaaaggtgacgggaagagaccggctcatggaaaaaacgtgggacaccgacattttcgtcgatgataatacgcttaacgtgtatatcacgcggctcagaaaaaaactgcgggagctgaacgcgcctgtttccattgaatcggtgcggggcgaaggctaccagctgagggcgctgtcatgaagctgtttctccggtctcatgccgtgctgattctgctttttctccttcaagggctgtttgtcttcttttattactggtttgcgggtcttcattctttttcccacctgttttacatattgggcgtgcagcttcttattttggcggggtatcttgcctatcgctggtacaaagaccgcggtgtgtatcattggctcagctcggagcaggaagggacggacatcccgtatctcggttcttcagtgttctgttcagagctgtatgaaaagcagatggagctgacccggctgcagcaccagaagctctacgagaccgaagccaagctcgacgcgcgggtgacgtatatgaatcaatgggtgcaccaagtaaaaacgccgctgtcggtcattaatttaatcattcaggaagaggatgagcccgtctttgaacaaatcaaaaaagaggtccggcagattgaattcgggctggagacgctcctttattcatcaaggcttgacctgtttgagcgggattttaaagtcgaagcggtttccttatcagagcttctccaatcggtcattcaaagctataaacgattttttattcaataccgcgtctatccgaaaatggatattcgcgatgatcatcagatttacaccgatgccaaatggctcaaatttgcgatcggccaagtcgtcacaaatgcggtcaaatattcggcaggcaagagtgacagactggagctgaatgtcttccgcgatgaagacaggacgatgcttgaagtcaaagattacggtgtcggcattccctcgcaagatatcaagcgggtgtttgacccttattacaccggcgaaaacgggcggcgtttccaagaatctacgggaatcggcctccatctcgtcaaagaaattacgggcaagctcaatcatacggtggacatcagctcgtcccccggtgaagggacatcggtccgattttcatttcttacaaaaatgtaagactgcgttaagaaaacaacatagctcattctgtttccccttgataacatggatttacgtcaaggggattttttatgctgaatgccccggcactacatgaaagcagcccagatcaacaagaataaaaccataaggaggattctcatggcgaatatgcttgaagtcaaacatataaataaaacctataaaggacaagtatcctatcaagctttaaaacaaatttcattttcaatagaagaaggcgggttcacggcggtgatgggaccgtccggctccggaaaaacaacacttttgaatatcatttcaacgatcgaccggccggattcaggcgatatcctgattcacggagaaaacccgcaccggctgaagcggacaaagctcgctcatttccgccgcaagcagctcggatttgtgtttcaggatttcaatcttctggacacgctgacaatcggtgaaaatatcatgctgccgttaacgcttgaaaaagaagcgccgtctgtcatggaagaaaaactgcacggcatcgcgaaaaagctcggaatcgaggacctgctcaataaacggacgtttgaagtatccggcggacagcgccagcgggccgccatcgcaagagcggtcattcataagccgtcacttattctggccgatgaaccgacgggaaaccttgattccaaagcgtcaaaagatgtcatggaaacgatgcagagcctgaatcaggatgatcatgtcacggctttgatggtgacccacgatccggttgcggcaagctactgccgccgcgtcatctttataaaagacggcgaactgtttaatgagatttaccgcggggaaaaccgccaagtcttttatgagcagattcttgatgtgctgtctatgctggggggaaacgcaaatgacctttcttcagttcgcttataaaaacgtcacgagaaacaaaagggcctatcttgcattcttcttgagcagcgccttttccgttttgattttctttacctttgcgatgttcctgtttcatccggcactaaaggaaggctacctgaataacatcgccaaaaaaggcttaaccgccgcggaatggatgatctttgttttttctttcttatttgttctgtattcggttaacgcatttttgaaatcgagaaataaagaattcggtattctgctgatgcagggtattacgccggtgcagctgagaaagctcattacggcggaaaacatgatcatcggcgtcatgtcgatcgcagcggggattatcggaggcttcattttttcgaaaacgttctttacggtcggcgcttatattttagaaatggacgcgctgcctctgtacatgccttggaaagcgctcggcattacggccggcggatttctgctcttatttttccttttatcgcagttcacgatcctttttgtcagatcaaatacggtgatcaaattaataaagggcactgacaagatcaagccggagccgaagccgtccgtgcttctgtccttattcggcatcgcctgcctgtgcggcgggtacggcatggttctgaaaggcaatgtccacgggaccgagccgttcatcattttactgcttaccgtcatcggcacgtatttctttttcagccaaagcagcatctggattctgcgcgcgctgaagaagtggaaaaccttttatctgcgcgggaaaaatgttatttgggtttctgaccttgtctatcgtttaaaagacaacgcccgcctgttctttatcgtcagtattatttccgcggttgcctttacggcgacgggcgtgctcgcgatgtacaaatcgaccgtcggggcggaagagtccgcctatgagatggagtatttatctttcagcaataacccgaaagaacagactcatttgaaagatattgaccatgaactgaaaacacacggctttacgtataagaaagacaaaatagatgtttcctatgttcgctatcaggaaggagaaactgttccccctgtttatatgatcagcgaatcggatgtatcaacatacttccatgttaagctgaacggcctgaaacataatgaggctgtctatttcccgggcacgtatgaccgcaatttcaaaaacgacgcgccggatcagctgaagctgctgaaccaaaaaggcaagccgtctgaccaaaaactgacggtaaaagaagtcaaaaaaccgctgatttcattgaatgccatcatcgcggtgaacgatcaaacctttgatcagctgaaatcactcggtgagaaagcgtcattatacggctacagctatgatcattggaaagacagtcttgggatcagccaatccttgaaaaatgagatttacggcaactatatcgacgtgcattctgattttatggcaaaagccgggacgtactatgatacggtgcagctgccgagcctgagtttattcatcggcctgtttatcgcgatcgttttctttgtcgcggcagcgagtttcttatatttcaggctgttcaccgatttagatgaggaccgggagcgctaccgctcattggccaaaatcggtctgagtgagcgtgaaatggcacaaagcgtgacgatacaattggcgattctctttttctttcctttcgtcattgccgtcatgcatacgctgtttgctttgagaacattagcggtggaaggctattccgatgtagcggggccgctcagtctgaccatcggagggtttttcatctttcagcttctgttcttcctagcggtgcggacaagctatttgaaaaaaatgaacaagtaaggggagtgcacagatgaaaaaagcattggcaatcctggccgtcttagcagccgctgccgtcatatacggacttctcttttttcataatgatgttacagacagatttaatccgtttattcaccagcaagatgtttatgtacagattgatcgagatggcaaacatcttagcccgggcggtactgagtatacattagacggatataacgcatccgggaaaaaagaagaagtgacctttttcgccgggaaagaccttcggaagaacgcgtatttgaaggtgaaggcgaaaggaaagtatgtcgagacctgggaagaagtcagatttgaagatatgccgggctccgtacagtcaaaattaaagtgaacatgaaaaacggcacagtgtcatgactgtgccgctttttttattttttattttttattttcttcagcccgtttgatcagcatgtcggtgatgatatccatctgtttgctgacggcaatcgggtcatacggatagaaggtgttgaaatcgttgataaagacacggttgttctttacggcatcgagatttttccaaacggatgactctttcagacgctcaaatgttttgctttctccattcggattgtaatcggtaatgaacatataatcagccgcatattgagggatgacctcttgggaaacctgtttcatggcgcccgttttcatgatgtctttttcgattttggccggcgctttcaatccgagtgcgttataaacggcttggccgccgcggccggaattgtcattaaaaatccagatttcgcctttatccgtcgtttcataaaggccgactgtctcgtctttgccgatcacgtttttgaggcgcttttgatcggcttcagcctttttgttgaagtctgccataaagcttttggctttatccttcgccccggcaatgtcgccgaataggctgaccgtatctttcgtattctttgcggtgttaaaaggaatgacaatcgtcggtgcgattttcgatagtttctcgtattggtcatccttcatcagcacgattaaatcaggcttcagctgcatcactttctccacattgacgggattgccgatgtccgtggtgtttttcagctgttttttgataaacggatttttgaaagcccatgagcccgccccgacgacatttgcgtcaacggacagcagctcacccgcataaaagtcagtgacgatccgttttggatgtgcgggtatgtcaatatttccttttgttgattcatatgtacgcatgtctgtctttcctttgcctgatgccgatccgttgttttccttcgcgccgctgcaagcgcttaatgcgaaaacaagcagaagtgccaggccgatcagccatgattgtttcttcataatgatccccctatttcggtgataatgattatcattattaatatagcaggaagacgtcattccgtctatgttttttatagaaaaccttccttgattatccatgttatagtagtaaaggaggaggaatgaatgttgattacgaaaagagggacttggtgggaagtgctgcacagctggtggctgctgctgactttcgcgccgtttgggctgaccgctttcttggcctttttctatatcggctaccgggccaagaacaaaaaatggctgaaatacggacttatctattttattattttagcaattgcttttgtgctgccgagcacgccgggcgtgtatatcgtgctgcctttatgggtcatctccatcatccacgggctgaaagtgcgggcggcttatttaatacagcttgatgtgtttaaacaaaacgtcgaagcaagagcgtttgaagcggtaaggcatgaggcggaggaaaaattcggcggaaaacccgctcaacgcattgatctgacaaaacagagataaaaacaaatgacaaagccggtatctcgcgctttgtcatttgcatgaccggcctattgctggtatgaatgctgctgaaacggtgtgtgtgatgctgtgtttgcgggaatgaagaaacattagcgtttgccatcggtgcaggcatgtgtccgcttacttcctgctgaagctgattgcacacattcacgatttgctggcatttctgaatggccagttcatgcccctgcagcgcttgctgaatggtatgaacggcatgctgttcatggttaagcatctgctgaagcatttgaatgttttgctgttcctgctggagcatttgcttgtactgctgactgctttgctgtgtctgctgaataagctgctgtgctgtttgacggcattgctgcagctgatttccgctgtattggttttgatacatcatgaagacctcctgaagtgattgattttacacatttatcatgtgaaagaataggagaggcattcatgcaagaaaaggattcaaatatttacctgttatgtacagagcggaatacaaggctcgggatggcctgtcgagctttgtattccggccctttttctcagaagccgccttctgtagcgtgaaaaggaatattgagtctgttttcgactgcgcgcaggcgctgattcaaacggtttaagcggcgggtatggatttcaatggactggctcagccgtctgatctgctcattcatacgcgtgatttcccggttttggcgctggtcttcttgtgagaggcgggtgagctctctcgtttgctgggcgttttgtctttcaagctgggcgactctccgttctaaagccgtcggctgccgctcttcagactgagggggcgcataataatagctttcctgctgctgatacggctcatactcaacggggctcacttcgtattcctgctgctgagggaaataggcagatggggtgtagtactgatatgggttcattcatcattctccttatctagtgaagtctttatacactatgtagtcaattgcacagtgccacggcatccgcctaacttacaggcgtaaaaagagcttcaaaggaaggtgatcatgttgcggaacatacggattttcatcatgacggttcttgttatcggatgcgtcatgataacaggctgctcgcaaaagaaagcagacgaaccccctttttattacgggacatgggatgcggggctgaaaccgggcccgatggacggggtcagatctgaaaccgttacgtttacgaaagacagcgtgctgacaaagcaggtcattaaaggccgcggcgaggttcccatgccctcagatgcttacaaggtggtctcacaaaacacggacgggacgatcgagattgaatacctcggacatccgcaccccgtcaaaagcacgttgaaaagaggaaaaaacgatacgctcatttggaagatatacggagaaacaaaaacaatgacaagaataaaaaccggcggggaggatgcacatgagaaataaggctgccgacagactcgttttgacgggtgtcatcgtacatatcattcaatggttttcactgttatggttattttttatgctttttgatcagttcgggcgttttaccatttataatcccaatgtcgtcaacggcagcatgcagtctttttcattctttgatatgatgcgcgctcttctgttttccggcacgctgcggaatacgctcctgctgtttctgtttgcggcgatgctcatttacttgtgggtgaacgctctgtttatcctgctggaaatcgtttcttatatcatgatcaggcggaacagccgttcattatgggcatactttcccgcagcgatgggaataaagcttgcccttctggacatagcggccgtccctttctttgcggcggggctgatgctcttgaagcagaaaacagatgacagcggcgaacaagctgacaaggggaaaagacggccccgcatccggaggcaggcccggtataggaagagaaggcggagaaacttgtccgtttgatttttcattgaaacgaaaaaacgatatgatgaaagcataagcagaaaaggatacaaaggagatgcaggatgtacaagttaatcgcaatagatatggacggaacactattaaacgatcatcatgaagtgacggctgaagtccgcggggcgcttgatgccgccaaagcggaaggggtcaatatcgtcctgtgcacgggccggccgatcggcggcgtgcgtcggtatttggaagagctgaacttacaggaagaaggagactttgtgattgcctataacggcgcactcgtccaaaatacgtatacaaacggtgtcgtggccgagcagtcattaggctttgaagatttggagtcgctttacgagctgagcttacagttggatactccgatgcattactttgacacagccaatctgtacacgccgaaccgggatatcagtgaatacacggtatacgaatcatacattacgaaagtgccgcttcatttccgcacgatcgatgaagtgccgaaggatattctgattccgaaagtcatgttcattgacgatccggacaagctggagaaagcgatcgcttctattccggaatcattcagggaaacatacacaatggtcaaaagcgcgccattcttccatgagattcttcacccgaaagtcagtaaaggaaacgcggtcaagctgctggccgaaaaactcggcattgaacagaaagacgtcatggcaatcggcgataacggcaacgacatgtccatgattcagtgggccggctgcggtgtggcaatggccaatgccatcccggaagtaagggagattgctgattatgaaacgaaatcaaataacgaacacggcgtggcgcacgcgattcaggagcttgtgctgaaaaaataggcaccccatcagagggtgcttttttaccgcgtgttttggtgatatgataagcggagaggggaggcgcgacatggatcgtgaaaaacagcagctcagcatagaagcggcaaaactatattatcaatcagattacagccagcagcagatcgccgaacggcttaatctgtcacgccccaccgtttcaaggctgcttcagtacgcaaaggaaaaagggtatgtgcaaattcgcgtcatggacccgtttgaggatctggatgaactcggcgcgaagctggaagaaaaatacgggctgcttgaggcgcacgtcgtcttttctccaagcgacgattaccaggccattacacattacttaagccgctatggcgcagactatatgcataaaaccgtaaaggacggcgatatactcggcgtaagctgggggacgacgatgtaccagatcgcaagccgcatggagccgaagcaggtaaagagcgttgaagtcgtgcagctgaaaggcggcatcagtcattccaatgtcaatacgtattcgtcagaaacgattcagctgttcgccgaagcatttcagaccatgccgaggtatttgccgctgccggttatatttgacagcgccgatgtgaaacagatggtcgagcgggacagacatattaagcggatcattgaaatgggcagacaagccaatatcgccctgtttacggtcggaaccgtccgggatgaggcgctgcttttcagactcggctatttccgggaagaagagaaacaattgctgaaagcacgcggagtcggcgatatttgttcgcgcttttttgacgaggaaggcaggatttgcagcagcagcattaacggcaggacgatcggagttgagctcagcgacctgaaattgaaagagcgttcgattctggtggcgggcggcagcagaaaatgcaaggccattcacggtgccctgaaaggaaagtacgccaacgttttgattactgatcagcatacggccaaaaaactcattcaagaattgtgacaattcatgaacataatttcaattaccaatttacatatgttcaaaattcggttattctaaacgtatcctaggaaaaaggaagtgcatacaatgtcaattgcaagtcaaatagaccatactgctttgaaaccgcatacacaaaaagcggatattttacaactgataaaagaagcaaaagaatataaattcgcttccgtttgtgtgaacccgacttgggtcaaactcgcagcggaggaactgaaaggcacgggagttgacgtttgcaccgttatcggatttcctctcggcgcaacgacatcggaaacaaaagcatttgaaacgaaggatgccatctcaaaaggagccactgaggttgacatggtcatcaatatcggcgcattaaaagacggcgatgatggagcggttgaagctgatatccgcgcggtagttgaagcagctgataaaaaagcgctcgtcaaagtgatcatcgaaacatgccttttgacagatgaagaaaaagagcgtgcgtgccgcttggcggtatccgcaggcgctgatttcgtcaaaacgtctaccggtttttctacaggcggggcaacggctgaagatatcgctctcatgagaaaaacagtcggaccggacatcggggtcaaagcatcaggcggcatcagaacaaaagctgatgttgacagcatgatcgctgcgggcgcgagccggatcggcgcaagtgcgggcgtctctatcgtgagcggcggagacagcggcagcagcgactattaatcagcattgcggaagccgaaagcttccgccatcctctttctttgttgatgcataaaaaattgtaagcgaatacaaataaaaggagaacacatatgaagtatctcatcggaattatcggaatcattgtgtttttaggtcttgcctggcttgccagcaacggcaaaaaaagaatcagaatccggccgatcgccgtcatgctcgtgctgcagctgattctcggttatattctcctcaacaccggtatcgggaattttcttgtcggcggttttgcaaaaggatttaactacttgctggaatatgcatcagaagggattaactttgtattcggcgggcttgtgaatgcgaaacagacgacgttcttcatgagcgtgcttctgccgatcgtctttatatccgctttaatcggaattctgcagcattggaaggtccttcccttcatcacgaagtatatcggtcttgcgttaagcaaggtgaacggaatggggaaaatcgaatcttacaacgctgtcgcatccgcgattttagggcaatcagaagtctttatcagtttgaaaaaacagctcggctatcttactgaacagcgcttatacacgctttgcgcgtccgcaatgtcgacggtctcaatgtcgatcgtcggttcttacatgatgatgctgaagcctgaatacgtcgtgacggcgcttgtgctgaacttattcggcggatttatcatcgcttctatcatcaacccgtacaccgtcagcaaagaagaggatttgatcttcgttcctgaagaagaaaagcaatccttttttgaagtgctcggtgagtatataatggatggattcagagtcgccgtcgtcgtagcggcaatgctgatcggatttgtcgcactcattgccctggtcaacggcgtttttaacgcggtcttcggcattacattccaggcgctgctcggatatgtattcgcgccgtttgcgtttttaaccggtattccgtggaatgaagcggtgagcgccggaagcattatggcgacgaaaatggtatcgaatgaatttgtggcgatgcagacgctctcatccggcgatttccatttcagcgcgcatacacaggcagtggtatctgtattccttgtctcattcgcgaatttctcctctatcggaatcattaccggtgcggtgaaagggctgcatgaaaaacaaggaaacgtcgtcgcgcggttcgggctgaagctgctgtacggcgcaacgctcgtcagtttcctgacagcggcgatcgtcggattgattcactgaacataaatgaaggacaggtgatagatcatgagaatggtagatcttattgtaaaaaaacaaaatggaaaagaactgacaacagaagaaattcaatttttcgtaaaaggatacacggacggaagcatccctgattaccaggcaagcgcgctggctatggcgatttactttcaggatatgacggatcaggagcgcgccgatctgacaatggcgatggtcaattcaggggaaacgattgacctctccgccattgaaggcattaaggtcgacaagcactctacgggcggggttggcgacacgacaactctcgtactcgctccgctcgtcgcggcgctcggcgttcccgtcgctaaaatgtccggccgcggccttgggcatacggggggaaccattgataagctggaagcgatcgaaggcttccacgtggaattgtcaaaagatgaattcatcaagcttgtgaaccgcgacaaggtagccgtcatcggacaaagcggcaatttgacccctgccgataaaaagctgtatgcgctgcgtgatgtaacgggtacggtgaattccatcccgctgatcgcaagctcaattatgagtaaaaaaatcgccgccggagcagatgccatcgtgcttgacgtcaaaacgggagccggcgcgtttatgaaaacggatgaagacgccgtgaacctcgccaaagcaatggttcgcatcggaaacaacgtcggccgccagacgatggccgtgatttctgacatgtcgcagccgctcggttttgcgatcgggaatgctctggaagtgcaagaagccattgatacgttaagaggggaagggcctgaagacttaaacgaactcgtcctcacgctcggcagccaaatggtcgtattggcgaaaaaagctgagacattggaagaagcgagaacgaagcttcaggaagtcatgaaaaacggcaaagcgcttgaaaagttcaaagagttcctgagcaatcagggaggagacgcttctgtcgttgacgatccgtccaaacttccgcaggcggcgtacaaaattgacgttccggcaaaagaagcgggtgtcgtttcagaaatcgtcgctgacgaaatcggcgtcgcagcgatgctgttaggcgcgggacgtgcgacaaaagaggacgaaatcgaccttgccgtcggtattatgctccgcaaaaaagtcggtgacaacgtcgaaaaaggtgagccgctcgtcaccctttacgccaaccgcgaaaacgttgacgacgtgaccgccaaagtctatgacaacatccgcatctcagaaaaagcggaagcgccgaaactgattcatacgctgattacggaataagacaaaaaaggcacatacctcatcagtatgtgcctttttttttatggcatggttttatccaaatgaatgtcacggacggattgtttcggctgtttctttctcaaaaaacgaatgagatagcacaggatcatacaaggaattccgcagaagagggcgattctttgattgggatcaaatgcaaggcctacgcatgaagcgaaacataagatcacagcggcgatcggaacgagagggtataacggcgtgcggaaggtcagatccgcgacgcgtccgccgtttttcacataatgttttcgaaataacagctgagacagggcgatgctcatccacaccacgacgccggcaaatccggctattgccacgagcaccacgtagaccgtgcccggggcggcgatgcttgagatcaaggatatgcaggaaacggccatgctggcgagcagagcattcagcggaatgcctttcggcgtgacttttttgaaccgggcgctgatcatgttttcattcgcaagagaccacagcatccgggtggaagcatacagtccggagttggcgaccgaaagcaaagccgttaaaatcacgaagttcatgatatctgcggcgtatgggataccgatctgggaaaagaccgcgacaaacggactttcaatcacaccggcttccttccaggagatcagtccggacagcacaaaaatggcgccgataaaaaagatgaccgttctccaggcgacatttcggatcgaacgcggaatatcttttgccggattggcggtttcacccgctgtaattccgatcagctccgtccctgaaaaggcgaagcttacggaaatcattgcgatgaaaaccgcaagaaagccgttcggaaacagtccgccgtgtgaggtgaaattcgacagcatcggagcttcacccgaaccgtgcaatgaaatcaaaccgaacatcgcggcgccgcctaagatgataaataaaaggatggtgacgattttgacgctggaaaaccaaaactctgtttctgcaaacaatttaacggagaatgcattggcggcaaaaaggagagccgcgaaaatcgcgctccacatccagacgctgctgtggggaaaccagcgctgcatgaggataccggaagctgtaaactccgatcctaccgtcaccacccaattcacccaatacatgataccgaccataaaacccgtggacggcccgataaacgttgtcgcatacgtttgaaatgaaccggtcacaggcatggctactgacaattctccgagacactgcatgacaagatacatcatcaagccgccgatcaggtaagcggcgatcgtcccgcccggcccggcctggctcaatgtataccctgtgctcaaaaacagccccgtgccgatgacccctcccaatgaaatcataaataagtgcctgcttttcatcgtgcgctttagttgattgccgccttgatcaacatccatcgtgatctccccctttttgcgtggcatgagaatcttccggcagccgagatcacgcgtgccggatttgactttaacgtgacaatttaaatcccttcaatgcatgtaaaatgacgtgtgcggctgcccggcttgtcatatcgcgaaaatcaagtgtcggatcaacctcaacgatctcaatacccgagatgtcagcctcctgggctaaaaaccggaccgcctgaagcagttcctcggtatacaggcctccggggccgatcgcaggacagccgggcgcatgagcttgatccagcacatccatatcaaccgaaataaaaatggcgtcggctcttttttgaacggccggcaaagtgtcttgtatcgttcggagaagccctttctcccggatcatctccattgtatgcacgtctgcctgacgctcttttacatatttttcatatgccaggctgttgctgaactccctgattccaagctgaatcaggttttgtccgcttatgatattttcatctaacagacggcggaatggcgtgccgtttgtcggccctccgtcttctgtgttgcggacgtcgtggtgggcgtcgaattgaaagacggccgttgttcctttcgtttccgcaatggctttaatggtggaataactgatggagttgtcgccgccgagaatgacgggcacccagtcaggctggtccgtcagaatatcataaatggtccgataaatgtgttcgtgagatttgacgacatccgtgacgtgaatctgaatatcgccgatatcgtacagatggtcaatgacatgctcccgcagctccgcggaatatgcggaaatgccgccgagcgcccggcggatcgcaccgggggcaaagcaggcgccggaatggctgattgacgacttagaaagcggaacgccgatcaaagccggccctttgatcgtttgtcccgcccacgcttccgtcacatcgccgatccttgtcacatggcggtcgttgaagagggagccggctttttgcagaaacggatacttatccaagagcggctccctcccttgaaacgaccgtcttcccgttcttgatgacacggcggacatgattgacgccgtaatgatacgggatatacatgtaattcggcgcttcccaaatgacaatgtcagccgcccgtccggctttgatttgtccggcctcttcgccttttccgatcgcatacgcagcgttaacggtgacagcgtgccagatttcttctgcggtcatttttaaatgaagcgcggcaattgacataatgagctggagattttccgtcggtgagctgcccgggttgaagtcagtcgccaaactgacccgtacgcccgcatcaatcatctcccgggctctcgcataagtgtgttttccgagatagaaagtcgtgcccggcagcaggacggcgatcgttccggactccgcaagcttttcgatgccttcgtcagatgcccccaccaaatgatcggcagaaacagcatgcagctctgccgccaattccgcgccgccgagcgggtcaatctcatcagcatggattttcaggccgaaaccagcttcagccgcctttttcaggtagtcccgtgactggctgacggtaaagacgcctgtttctgtgaaaatatcggcaaattgcgcaaggcctttttcttttatgtcaggcaaaagctgcagcatgcgattcagaaattcgtcagggctgttccggtactcaggcggaatggcgtgtgctcccataaaggtcgtgacaaggtcgaccggctggcgctcacccagttttttcgccgcggtcagctgtttcagctccgtgtctttgtcgagtccgtacccgctttttacttccgcggtcgtgatgccgtatgacagcatgcgtccgaggtgaaaaagccctttttcaatcagttcttcttcggaggcggctttcgtgtctttgaccgttgacaaaataccgccgccttgcgccagaatatccaaataagacatgccctgaatttttaaattcagttctttttcgcgggaccctccgaatacaagatgggtgtggggatcgacgaggccgggggtgacgagccgtcccccgcagtcgataatgtctcctgcctcgtatcctttctccgctccttgatgtccggcaaaaacaatgcgcccgtcgtgaacgccgatgacggcattttccgtgacatgaagatcctgcatgctcccgccggatcgggggccgccggattccatcgtcagcagctggccgatgttggtgagtatggtatctatttgtttcggcatgttaccgctcctttttcatcggtatcataatgtcttgttcctcggcgacttgaaccgctttttcataacctgcgtccgcatggcggatgatgcccatacccggatcgcttgtcagaacgcgggaaagccgttgttccgcaaggatgctgccgtcagcgaccgcgaccattcccgcgtgaagggaataccccatgccgacgcccccgccgtggtgaaaagaaacccagcttgcgcctgaggccgtgttgatcagcgcgttcagcaccgcccaatcgccgaccgcgtcgcttccgtctttcatcgcttctgtttcccgattcggagaggcgacagatccgcagtctaaatggtctcttccgatgacgatcggggctttcagctcgccgtttctgaccaattcattgatggcgagccccatcttttcccgttcaccgtagccgagccagcaaatacgggacggcaggccttggaacgtgacttttttctgcgccatgtcaatccagcggtggagggcttgattttctggaaacagctcttttaataaagcgtccgtgcggtatatatcttcagggtcaccggacagcgcagcccagcggaacggcccttttccttcacaaaataaaggccggatgtaggccggaacgaatcccggaaaatcaaaagcatcggcgagaccctcatctttggcagcctggcggatgttgttgccgtaatcaaagacgatagccccttttttcttgaaggcgagcatggcttccacatgctttttcatactctgcttggaaagccttacgtataaatcaggctgatcccggcgcaggcggtcggcctcctcaagtgagtatcctgccggaatatagccgatcagcgggtcgtgagcggaagtctgatcggtcacgatgtcaatatggacgccgcggttcaaaagctcatgatgcacctctgccgcattgccgagaaggccgatcgataaaggttctccggcttgtctggctgtttcggcccagcgcagcgcttcgtcaattgatgcggttttccggtcgcaatagtttgtttctatccgtttatcaatccgtgtttcatccgcttcaacggcgatgacgacgccatcattcatcgtgacggacagcggctgggcgcctcccattccgccaagtccggccgtcagcgtaagggttcctttcagactgccgccgaaatgctgtctcgcaagctccgcaaaggtttcataggtgccttgcaaaataccttgtgaaccgatataaatccagctgccggcggtcatttgcccgtacatcatcagtccttttttctcaaggtcatggaaatgctcccaatccgcccatttcggcacgaggaccgaattagccagcaggacgcggggcgcgcggctgtgcgtgcggaacagtccgaccggttttccggattggatcagcagtgtttcatcatcttttaacgttttgagggagcgctcaatcgcgtgaaaagcatcccagtttcgcgcggccttgcctatgccgccgtatacgatcagatcctccggcttttcggcaacctccgggtcaaggttgtttcggagcatgcggagcacggcttcctgctcccatcctaagcattcaagttcggtgccgcggccggcgcggattgatttctttacatcagtcatcttgtaagtcctccttcattggtcatcagtttttggtgatgctcattcggcagaaaagactccttcttcagccagtcactcagatgttcgatgtcataagaaaacacgcggtcttcttgtatggacggcacgatgtttctcatttcgagatagagctgttttgtgtacgaggcgcaatgttccgcaccccggtattccacggcctgcagcgcgcaaatggcttcaacggcaagcacccgtctcgtattcgcgatgatctggtaggcgtgccttgaggcgatggttcccatgctgacgtgatcctcctggtttgccgatgaaggaatggaatcgacactggcgggatgggccagggttttattttctgacacgagggaggccgccgcatattgcatgatcatcgctccggattgtaagccgggctgagggctcagaaagggcggcaggtcattcagctgcggattcacaagccgttcgatacggcgttcagaaatattcgcaagctcggccgccgccactttgagaaaatccatggcaaaggcgatcggctgtccgtgaaagtttccgcctgagatgattttggcgccgtcttcgaaaatgagcgggttatctgtcgcggcattcatctcaatttctaatttttcttttacatacgctaatgtctgccatgatgcgccgtggacttgaggaatacagcggatcgaataggcgtcctggacacgcagctccccttggacggtcgtcagcttgctgtctgacaagtaatagcggattcgctctgcgacatccatctgttcctgatatccgcgggcggcatgaatgtcctcgtcgaacgcatcgataatgccctgaaggccttcgatcgttaagctcgcgatccgttccgactgataggccagcttttcggcctcgaggtaagcgatcagtcccatcgcggtcatggcctgcgttccgttgatcagcgcgagcccttccttagaggtcaggacggccggctgaaggtttgtcttttccaaagcatgagctgccggcatccgggccccttcgtaaaagacttcgccttgcccgataagcgccagtgcgagatgagaaagcggcgccaaatctccgctcgcccccagtgacccttgctgcgggatgaccgggtgaatgcgatgattgagaaacgcgagcagttgatcaatcagctcagtccgtacgccggaaaagcctttcagcagggcattggcgcgcaaaagcagcatggcccgcgatacagattccggaaacggatcaccgacgccgcacgcgtgagaaagaatcagattcagctgcagatccgcggcgtcttctttttgaatcagcacatcgctgaacttgccgaaccccgtcgtaatcccgtaaatggtcttctcttcttgaacgatccgttcaaccgccgccctgctttttttcacacgttccatgctttcggcagatgcttgaacctcttcaaaatcaaacagcacacgctgggcatctgcggttgtcagtgaggaaccgtctaacgttaccatcatttcaacccctttttctttactttggtaaagcgcccatacaaaaaggagctatgccatgaaaatgatatttcacgcatagccccctatcatctgatatctatgggctgattcatatgtgattaattccgactccgaatgtttcgtgctcaagccccttaatcggagctccgatcgtgccgtaaagggaaacggcgatccaatcgccttccgcctcgctttcatacggatttccccgcaagacggcaaacttcaggcccacggtacgaagcagcgagccaagcagcatttcgccccgcgtcactccgtgcaaagcttccattgtggcatgatacagcgcatgtgattcgcgataaccctcagattgaatgacgccgctctttttggaagcggtttcaattgcagctaccaccttatgcgcatccattgaacccaccctgccgagacagactttccagccgtcccgttccagccggctgatctgctggttttcttcagtctcatgaagcagaagaaggacggacaatcgcccgatgcggcggtctttgtgtaaggtcatatatgcttcactcaattcttaaatattctgataactagtaactgttttttatattaagtgtttgcgaatcagaagtcaaaactttttttccagtctttcacaaatcagattgctattgtattaaagcggtacatcgggaagccggcgctgttgatcacatatttccgccatccgcgtcataaaatagagcgttgtcttgaaagcgttttaagaaaagaagagagcgaggagatttcagaaaatgaaaaccagtttctttcgtgtgtgcctggtctcagcagcggttatcgggttcactctgccgcaggcaaaagcccagcatcccgttttttcagaggtcagcgtgcatgatccgtccgtcatcaaaacaggcgatacatactatgtattcggctcgcatttggcttccgccaagtcgaaaaacctgatgcagtggcagcaactgtcttcaagcgtcaatcccaataatcccctgatcccgaacgtctactccgaattaaaagagacattcgactgggcccagtctgatacgctgtgggcgccggatgtggctcagctggctgacgggaaatattacatgtactataacgcctgtaaaggagactcgccgcgatccgctctcggtgtcgccgtgagtgacaaaatcgaaggaccctacaaaaacaaaggcatctttttgaaatcaggcatggaaggaaaaagcgaagacggcacgacgtatcatgcaaacgttcacccgaacgtcgtagatccgcaaacgttttttgaccataaaggcaagctctggatggtgtacggctcttactccggggggatttttatactggaaatgaatccgaaaaccggtttcccgctcccgaaccaaggctacggaaaaaaactgctcggcggaaatcacagcagaatcgaaggcccgtacatcagctacaatccggaaacgaaatattactatctgtatctgtcattcggcggacttgacacagccggcggctacaatatgcgtgtggcgcgctctaaaaatccggacggtccgtactatgacgccgcaggccataacatgcttgacgccaaaggaaaagacggcagtttcttcgatgacaaagcaattgaaccgtacggggtcaaactcatgggcggctacagcttcgcctcacaatctgaaaaaggcacgggctacgtttcaccgggacacaactccgtgttttacgacgggaaaacgaaacgatcatacctcattttccacacccgtttcccgaacagaggcgaagagcacgaagtcagagtgcatcggctgtacatgaacaaagacggatggcccgttgcagcgccgtaccgctacgcaggagaaccggatacacacatatcggcagccgccgcatccggagcctacaaactcatccagcatggaaaagacattacagctacgatcaaaaccccaaaaaccatccggcttaacaacgacggcaccatttccggggaaatgaccggaacctggacaataacgaacagcagcaaagcccgaatcaacctgaacggcacacattatgacggtgtcttcctgaaagaatgggactcagcgagagagaaagaagttgtgacgtttagtgtgctgagcggtgatggggaggctgtttggggagtgaagtgaaaaagcacctactccagtttggagggtgcttttttcttgctaattaggagaatgaccttctattgcttttaataaaccatttgaattatgatggactcaacctctatcgtttacagtgaacagtataaaattgataacaaaaatatgaatacatacctaagaaaaaacgaaaggaagtttaattttgaaaaaaacaataaaagtagccgccgcagttatacaaaatgaaaacaatgaaattctatgtgctctacgttctccaacaatgtctcttcctaatctgtgggagtttcctggtggaaagcttgaagaaggggagaatgctcgggaagcacttgtaagagaaattgaagaggaacttgattgtaaaattgttacgggcgatgtgatagctgatattcatcatgaatatgagaaggtcatcgtcaatttaatttcaataaaagcgaggattgtatcagggaagccggtagcaaaagagcatgcggaattcagatgggtgcctattcgtgagctagaatcactagagtgggcacccgctgatcttccgaccgtatctgctttaattcgttaaatccacatacaagttttctgggacaggctgatggagcttccatttgacattcattggcttgtctccgtggcttgatacgtaatccgcttctcctaaataaataaatggtaaagtgatgttgtgcatttcagtgaatttcctcacaaataaatgaatatggtatcctttttccttatggtgaataaagttttgccctacgcttgatatatgtgaggtttggttttgactttgccagtgaaaatggctaggatcaataaaataatctttatatagcaaatgatcttctactttttctgacttattcaaattgataaagattaaatagtgatttttaactctacgtacaccctctcgccaagtcccttcctgatcagttgactgaaaaagataaatgagctcatttcttgtataggtctgatacaatgttagcttaatctcttttgaagcaagggcttctatattgttcatacgtctaaattcaatcagtccatagtggacgcgctccttaatatacggtccgaataatggatcggttaaaatctcgcttacttctggatctaacttgaatgtatcaccttgtaatgtaccaaagcgccaattctgtttttgatctgatttcgttaaacgctccattgctcgctgaatgaggtcatcatgtgtatctgttgtgatttgaatatgaaactgtttttctaacgattcttttacatcttctattgtgatgatatttttgtgaaaaccgctctgtaaaattaaccattcataaggccatttaataggtaattgctgttctaatcttgctactatccctacaaccaaggggttattgagaatcccttcatctgtaacattcaaatcgtccattttctttttggtctgtacccacgatttgtatttctttataaaaaaggtaagcccaggtgcctgttcagagtatagaaaatcaattaattctggagagcgccctagctcttgtttaaattgcttgtataacgttttcagcatggcatctgaatttagtttaatgtgatcgatcttatttaaaatttctttcttcgttatggctgaaaggtcaacataagatcctccaggtaaatctgaaaactcatgcgtcacggccactcggagggaatctttatcaaaagatttttggcttgtttgtccagatagtgcgagtggaataacgaatgacttttgatagtttccgataaaatccagtatcgttacaaactctttgtcgtcagtttttctaagtccccgtcctaattgctgaatgaaaatcgttggtgattccgttggtctaaggaacaatagtagattgagctttgggatatctattccttcgttgaaaatatctactgtaaatataagttctaaactgtggtgcgggtcctctaattgacgaatgacctcttgtctttttgcaggagaatcatttcctgttaaataagttgtataaaaacccaatttattaaattcatcactcatgtatattgcgtgttcgacgtttgtacagaaacctaagccaaccattttctcgccgtggaatccatacatgttgatcatcttgatgatatattctactcgtttatgcgtttttaaatgattgactagcgatttctcttcgtacagtccgtttttcacttttactttttcgtaatctacagtatgatctgaaattccaaaatagtgaaatggcgcaagtagctctgcctttagggcatcgcggagtctgagttcataaacaacattatgatcacaaatctgaagcacatctttaccgtcaagacgctctggtgttgcagttaaacctaataaaaactttggtgtaaagtagtttaatacagcttgataggtagatgcttctgcatgatggaattcatcaatcacaatgtagtcaaactcatctgttgaaaaagattccaaagtatcttttttatgtaacgtttgtatagtgctaaataaaaaacgcttatctctttcttttttcgtgccagtcaataagccaaaatcttcatgattatttgtgactttcttgaatgtttcgattgcttttgaaagtaactcttcccggtgggcaagaaaaagatatttatttggtttaaattgctcaaaatcaaatgctgctaaaaatgtttttccggttccagtggcggcgatgatgactgcttttgtctccccttcgtttcttgtttttttaaggtttcgtaatgcttccttttgcatggcattcggggacattttcgttttgtaaagagagttttgagcagcaaaggaagcacttaccttttggcttccagcttggaattcctcataggcttgtaaaaattgttcgtcaacaggctgtgtcttttcattccaaacagtgtcaaacaaatcttttgtttgttgataaacggggagatatctggtttcaggtagtctcacatttaactcatacccagtcgtaagggcagcttgtgatagatttgaagatcctacaatgacactatgctgtccagaacagcgttcaaataagtatgctttcgtatggaaagattttttatattcatttacaattctcaactcaacattttcaaattgaagaagatgtcttaacgccttcggttctgtaatacccatataggtagatgtaatgatgcgtacagggacatgtcttttagcaagctcctgaagcggagggatcaaaagctgaacaccagaccaccttgtgaaactaaccataaagtctacccgatccgccgttaacatttcgtgttttattgctttgaaaaagttctcatgagtttgatgatttcctagcagtttcagacgatgtagagaaaattcctctgaaataggaagttccatttcatttaaactataaagcactgtggaaagtggcaatgaaaaattcgtatgttttccaagctgagaggcgaccttctcgctcagctgaatcgcttgttcatattgatcttgatccacaagtgtttgaaatgtctcgctcagttgttttgccgtatgtaaagtcaaaacttctgcatattcttttgggctgaccggttgaatgcgatgtgatgttggataaagtttttgttgttgctgaatttcctcatggaagcctctatgatttctcatcataatctccttttttatatcaataattccattttatcactacttttaccaataggtaatactgaaaaagaagagaataaagtcctatttattaagcgcttaaaaaataacgctgaggtagtttggtttggtataaagacgtcatcgccacaaacggagaaagtctgtaagcgcaatgttccggagaaagccggcaaaattgacattcagcaaagagaggaggacaataaaagcagaaaggcgggattcatatgtttaaaaaaattcttgcagcagtagacggttcagacatgagcagcaaagctttggacgcagcgatccatctggcgaaagaacagcaggctgaactcaccattctttatgcgggacgtgaagccgttgtctccacatcagccttaacagggattgtctatgttccggaaaacttcattgaagacatcaaacatgaagtcgagcaaaaaggagcggccattctggaaaatgccaagcagaaagcggctgaaagcggggtaaacgcggaaagcctgtacgtccaaggcgaacctgcgcatcaaattttaaacatagcgaaagaacagcatttcaatctgattgtcgtcggaagccgcggaatcagcggatttaaagaaatgatgctcggaagcgtgagccataaggtctcacaattgtctccttgtcctgtactgatcgttcattaaacagaagaccctgctgatgcggggctttttttaatgagaaaagaccgccgtctttcgaaaaataggatgaaatcttcctctgaatcaagtaaaatggctgttagtatttgtctgaataaacagtcaatgatatgggggaagcaaatcaatgcaagctgaacaaacatcaaatgccgtcatcaaaatggtcatttccatggtcattttcggatcaatcggctttttctcggaacatacgaatgttccttcaattgaactggtctttgtgagatgtctgtgcgcctctttgtttctgggcgtttgctggtttggttccggacggcaccgcaccgaacaatggaaccggcgcgaggtgttgcagacattggcctgcggattttttctcgtgctgaactgggtgtttttatttaaatcgtttgaggagacatcagtgacgatagccatttccgtttatcatctggctccggttctcgtccttcttctagggagccttatataccgggagaaactgcatattgtgtccgtcacttccatcgtgatttgttttctgggcaccgccctgatttccggcatcaacggaaatacgtcattttctcagctgatgggatcgggtattatttgggccgtgctggccgcccttttttacgcctttacgacactggccgggaaaggtatcaacagtctcagcccatatgcggtcacctgtttgcagaccgggttgggcgttatcattcttctcccgttcgtccgtttcggcgctttttctgatttgtcgcatgtgaactggatcatgattgtgtcaaccggtatcattcatacgggaattgtgtatttgctcttttttgacagcttgcggtttttatccacccggtttatatcaatcatcgtatttcttgatccggcggtggcgattgtgcttgacaccgtatttacggggtttcgccccgacctttatcaatctttggggattgtgttgatttttgcgggaatggcactgtccctgattcgaaagcaaaaagccgtgccggcggaaactcaggcagacagcacccgtatataggcggccgtatcggctgctttttttgttttggggcttttcagccataacgaaaaagcagacaaacagatcatggaaaaagaggatagtaattgtataatacttcatgtgtttgcaatttaagagattaaaggagtgaagggcatgaaaaagaagacgcgtcatctcgctttcttggctgcactcggctttgcgctttgtctggccatcgtatgttccgcatccaagcaggcagaagcggcagcggcttatccggatgtgatgcagggacttaccggattcgctggcaatgcgaaggatcataacggaaaagcaaaatccgccgtatcgggaggccagggcggccccgtcgtctacgtcagcaatctcaatgatctgaaaaacaatgcgggcggaacggaccgcaaaaccatcgtcatcacaagtgatatttcttccccggggaaagccgttgtgacagtcggcgccaataaaaccatcgtcggctcttataccagccacaggctgaccaacatctatctgaccaccggctccggatcaaacaatgtgattttcaaaaatctcattatcagccataatgccgccattacaggcaacaacgacattccgatgtacatagcgaacgggcagaattactggattgaccacgtgtggtttgaaggacacagctacaatccgaacagccacagcgatttgggaaagcttctgtatgtcggcgccaaagcggattttgtgacgctgtctaactctaaattcacagaccatctgtacggcctgattctcggttatccgaatgatgataacgaaggacgcaattatatcggctatccgcatatgacgatcaccaacaactattttaataacgtctatgtgcgttcaccgggcctgatgagatacggctattttcacgcgaaaaacaactatgtgaccaatttcaatttaggattcaccattcatacaaacgcgactgtcttctcagaagccaactatttcggtaacggaaatgaaaaaggcggaatgatagacgactacgggaccgcccaattcaccgacaccggttcattcccgtcgctcaaagccccgaaatcaccgcgcaccggctggaatccgagatcaaattacagctacggcacgctttcagcccaggacgccaaaaacttcgcccaatcctacgcgggagcgcaaaatacaaatctccgctatccataatacaaaaaaccgccggcagccggcggtttttttatatgaataaaaggttcaaaattcctataatccttaaaataaccttaaatacctaggaaaatattgataaacaatttcaataatattactattgttaagcctatattacaaaagaaggaggagaacctatgaaaataggaaaaaagaacaagtggaaaaaatggctggccggcactcttgcggcaacgcttatgatttccattgcgcctgccgatgtatttgcggcagaaacgcgtgaaaaacaagatcaagcgaaaaccgccgccattccggcagcagacccggaaaaagatcttccggcggaaaaagcatccgagcagatgccgtttgatcaaaaagatatcaatcaagacggtgagatcacgtctgaaagaactgagaattcaaaactttattatgagggcgagggtgtatacaaacaggaaatctacacagaccccattcatacgaaagaaaccgccaatgcggactgggaagacatttctcctgaattgaaaaccggctcaaaggatgtcgggacggaaaatacagtgctgaactccgattttctgaagcaaatgaaaaacggattatacgctacatttgaacacggtgatcataagctcacatactcattaaccggcgcaaaaggccccgatcaggctgcaatcactccgacagatgcctcagcaaaagtgaaggaagacagcaacgagcttacgtatcagcaagtgtttcctgctattgatttacaaacctacacatttaacgaaaacataaaagaagaccttgtgcttcacaaatatgaaggctacaattccttcacctttcaaatcaaaaccgaccttcaggctaaagaacaggaagacggctcgatcgcgttttctgatgacaaagacaatgtcgtctacaccgtgccgaagccttttatgaccgactcagatctcgacgagaagtcaggtgaggtcagcaggtcagaagatgtcagcttcaagcttgaaaaaaacagcgaaggctacttgctgcatgtaacggccgatgaaaaatggctgaaagatcccaagcgggtttatccggtatctattgatccttccacatcagtatccgtgtcatccgatacctttgtcatgagtgcgtacccgacgacaaactactctgccgcgtcgcagaaatgggaggccggattgaaagcgtacgtgctgaaaacaggttattatgacggcacaaccggaacgaactacgcatttatgaagtttgataatctaaagccgatcaaaaacatgacggtgacaaaagcgacgcttaaagcatacacagcccactcctattacggatcaaaggcgacggggctttggctcgacaccgtaaacagcaattacgacaatgccaagatcacgtggaaaaacaagccgggctccaaaaacatcggcaaagccgaggtctataaaggccaatgggcaagcttcgatgtcacatccgcagtcaagtcgtggaacagcggcggcgccaattacggctttaagcttcacacaaacggcaacggaaaagaatattggaagaagctgatgtcatcagcaaactctgctaaaaaaccatacattgaagtgacatacacgattccgaaggcggacacgccgtctgtcaaagcgtatcataacggagattcgacaggacttttcaatatcagctggaaaaaagctgaaggcgccaaaagctataaagtgtggctttataacgggaaagaatatcaagccatttctgtcggcaatgcaacctcttggagcacaaaaggaaaaaacatctggccgacaaaagcagaaatcgactccggcaaatataagctgcatacagacggaaaaggcggaagtgaattagcgcttaatccttcgccggtctataaaaactccggcggcagctatccggcaagtaaaaattactgggtcgcggtcagcgcggtgtttgaccagggagaaggcgccatgtctgcggccgccaagcccgtcattccgaatattggcagagttcagaaaccaagcacgaaaggctttaataacaacaacgccacaggctggtttgatctttcctggaaagccgtatcaggcgcagccgggtataaaatgcaagtctttaacggcaaaagctttgaaacgcttgacctcggaaataaaacatcctggtccacaaaaaatcaaaacatctggccgacaaaggcggaaatcagcgccggaaaatatgcgcttcacctgaaagacaaaaaaggcgcggaattgccgatcaacccgggccccgtttataaaaatgccggcggagacgcaaaccggaaaacatacggatttaaagtaatcgcctataacaaagacggagaagcgatcgcctcaccggaagctagtccggcgctgcctgatatcgcaaagccgaaaaatctgacaggctacgtctatacgaacacgaaatcgagccaaacgggttatgtcaatctcatatgggataaagtcaaaaacgccaaaggctacaaaatcaacatctacaacggaaaagactatcaatcattcgatgtcggggataccgatcattggacgacccaaaacaaacacatctggccgtcagccgatgaagtgaaagcgggaaaattccagcttcacacggacggaaagggcggcgaactggcgcttgacccttcacctgtttacgaaaacgcaaacggcaattacaaagggaagaagaactattcctttacgctgaccgcctatgacgcaaatggtgacagtataccgacggcaccttttaaccctgttttccatgaaggtgcggaattcctcggaacggaagaattctggtctattatcgacattccggacggacagctgaacggcgcgacgggaaatgtcatcgtcaatgaagaagatatgtcaatcgacggacgcgggccggggctcggactctcccggacctttaacagccttgacagctctgaccatatgttcggccaaggctggtatgccgatgcggaaatgtcgattctttctgaagacggcagagccgtttatattgatgaggacgcgacaacacatgtcttcacgaaaaaatctgacggcacgtatcagccgccgacgggtgtttatctcgaactgacagaaacaagcgaccaatttgtattaaaaacaaaggatcagacgaacgcttatttcagcaaaaaaggcggcaagcttcaaaaagtcgttgacggacacaacaacacaaccgtatacgaatataacgacagcaatcagctgaccgccataacagacgcatcagggcgcaagctgacatttacctatgatgaaaacggccatgtcacatctcttacagggccgaaaaacaaaaagatttcgtattcatatgacaaagaccttctcaaaaaggtgacggatactgacggcagcgtcacaagctacgactatgatgccgaagggcgcctcgtcaagcagtattccgcaaacagcacggatgacaaaccgctgttcactgaataccaatacagcgggcaccgcctggccaaagccgttaatgcgaaaaaagaaacgtatgattacagctatgacgccggcaaaaaaacgctgctcatgacgcagccgaacggccgcaaagtgcagtacggctataacgaggcgggcaacccgattcagatgatcgatgatgccgaagggctgaaaatcacgaccaacactgtatacgaaggcaacaacgtcattcaggacaccgatccgaacgacgcggatgcgggcaaagcgacagaaagctatcaatatgataaagacggcaacgtcacagccgtaaaagacaactacggcaccgaaacgtatcagtacaacaaaaacaatgacgtaacgaaaatgaaggataccgaggggaacgtcactgatattgcgtacgacggacttgatgctgtttctgagacggatcaaagcggaaaatcctcatccgccgccgtgtatgacaagtatggaaatctcattcaatcaagcaaagagctggcagcttcggcaagcctgctgaaagacggcagctttgaagcaacaaagctgggctggaatctcaccgctacgagagacagcggaagcatcgcgtctgtaaaagcaagaagcggcgcgctgtccggacaaaaagcactggagatcacctcacaatccgcttcagccggaacagagcacggccatgcgtccgcaacgcaggaagtgcagcttgagccgaatacgacgtatacactcagcggccagatcaaaacggatctgacaaaggcgagagcgtatttcaacattgatctgcgtgacaaagaccaaaaacgcattcaatggattcacaatgaatcaggcgcattagccggaaagaatgactggacgaaacggcagattacctttacaacaccggccaatgcaggaaaagccatcgtctatatggaagtggatcataaagacaaggacggcaaaggaaaagcgtggtttgatcaggttcagctggaaaaaggcgaagtctcttcaagctataacccggttcaaaacagcagtttcacggctaaagcagatggctggagcacaagcggagccgccgctgaccttgatgaaggcttcgatgatgacagctcattaaaagcgtcccgcacaaatgcatcacaagccaatgcggccgcaaaacaaaccgtcacattaggccaaagcgcggacgataagccggtatatatcacgctgacagggatgtccaaggcagacggcgtaaaattaacgaacgacaatgattacgcgcttcaggccggcgtcacctatgcggacggcacgacgggcgtctacaccgccaaattcccgcaggggacacaggaatggaaccgggcggcggcagtcattccgaaaacaaagccgatcaataaaatcgaaatcagcattctgttccaaaaaagcgccacaggaacggcgtggtttgatgacatccgattaatcgaaggaagcatcctgacgaaaaacacctatgacgaaaaaggaaactacgtcacaaaagaagaagacgaactaggttatgcaagcactgcttcatatgacgagactggcaagaaaatgtctgaaaccgacgcgaaaggcgaaacaaccgcctacgaatacgatcaggccgaccagctgacaaagctgaccctgtcaaacggcacatccatccttcacagctatgacaaggaaggaaatgagctgacaaaaacgattcgggccggcgcaaaccagacctatcaatatgaatatgacgtcatgggcaagctcgtcaaaacaaccgacccgctcggcaatgtactgaagagtgaatatgacgccaacagcaacctgacgaaaaccgtttccgccaacggcaatgaagtgtcgctgacctatgacggcaccgaccgggttaagtcaaaagcgtataacggcactgaaaaatacaactttacctatgacaaaaacggcaatgaaacgtcggtcacaaacaaagaacaaaatacaacgaaaaaacgcacctttgacaacaaaaaccgcctgaccgaattaaccgaccgcggcggcagccaaagctggacgtatccggctgattcagataagctgaaaactttctcatggagccacggcggccaaaaaggaacaaacagctttacgtacaacaaacttgatcaaatgattgaaatgaaagacggcacttcagcctatacatttgattatgatgaaaacggcaatgtccagacattcatcagcggaaatgaagtcggcacgagcttctcatatgatgagcggaatcttgtcagctctcttcatatcggagcgaaaaacggcggcagcatcttccgggaaagctatgaatacgacgccaacggcaaccgcacggtcatcgacagctcagccggcggaaaggtgcagtacgaatacggcaagctcaaccagctcgtcaaagaaactcatgaagacggcaccgtcattcaatatacgtacgacggcttcggcaaccggacaaacgtcaccaccacaaaggacggcgcaagcaaatcagtcaacgcatcattcaatatcatgaaccagctgacgaaggtgaatgacgaagacctgtcctatgataaaaacggcaaccgcatatctgacggcaaatacacatatacgtgggacgcggaagacaacctgaccgccgtcacgaaaaaaggcgaagacaagccgttcgcaacatacaaatacgatgaaaaaggaaacagaatccaaaaaaccgtcaacggaaacgttacgaactacttctatgacggagacagcttgaacgttctgtatgaaacagacgccgacaacaacgtcacaaaatcatatacgtacggtgacagcggccagctgttatcctatacagagaacggcaagaaatatttctatcactacaacgcacacggcgacgtcatcgccatctcagacagcaccggaaaaaccgttgccaaatatcagtacgatgcgtggggaaatccgacaaaaaccgaagcaagcgacgaagtaaaagacaaccgctaccgctacgcaggctaccaatacgacgaagaaaccggcctgtactatctcatggcccgctactacgaaccaagaaacggtgtattcttatcactagacccagacccgggcagcgatggggattctttagatcagaatggatatgcatacggaaacaacaacccggtgatgaatgttgatccagatgggcattgggtgtggctagccattaacgccggctttgcggcttatgacggatataaggcatataaatcaggtaaaggatggagaggtgcagcctgggcagcggcttcgaactttggtcctgggaagttatttaagggtgctaatcggatttataaagctgctaaaacatataaactatctagaaaaagtgtacgggctagaagggcctactcaagttatagggatataactggaaaaacttctaggttcaaaaattattctactaatgtaaaaagaagaacttttgaaaaaaatttaagaagacaaggatggagaaaatcagttcatcatgggggtgttatcactatgacgaaaaatgggaataagtattccctaaggaaacatgctaagtcaagtccctatccaaccgcggaatatacacctaaaggtagaaaaaaattcacacacaaaatcagaatgcgacattaaaggggaaataagatggatcactattttattgatcatcctaaggagttaaaagtctatcaatccataattaattccttatgtcacgtagatcaaacattgcctaaacaagtttttaagcaaaggaaaaattattatttattcgaggaattccattgggtattatctgaagaaagttggggaatgtttaagagtttggctaatgaacatcatgatgagtttatattaatggctgttatagacagttctgaacatataaaccaattctacgaagaatttgagtattttaactggataaagatccctttgcatataactgcagatgagtatctgtcactcttaactgattatccaaagcacagtaaaagtgactgtataatgaatattgcatctcgtgttgtttgggcttcaccgactttaaagtgggcgatttatggtgagagagaacttgaaatctgtattctaggtattgatcatcagagtgaaggaaaagaactagcaacttggagatcgttagatggcgttgtcttagattggatatcagttgtattcccaaatcagacggttccagttgaatttgaaaaaacacttacggcacattacaaataagtatatttttaatacctactaccgatatcatctgattgttctaaacgggatttcaaataatctccagatagtatttttgcattcaacagatatttaatgacaaatatgcagagtaatatatttttggggcttgtttgaataatctatgtttatcatcaagacacttctatcaatgggtttgttagtgttagttaggagaaggagaagacaatgcacaaacaaattgaacaatagagtagattatattgacgagggatgtaatattttaaaggtcgattatcagttctttaaaaaagacctgttttaaggttcaggttgttaaaaatgcagcatctgtttattttagtgcagatattggtgatatgagattagaaaaaatagattcggaagaatacaattggcaagtatttgagatgagttaccacccggaaggaatcggtaatctatcaaatgctgtaattccggagtatcaatcaaatgctaattttctcattgacatgaacagaatgctgattgctgtagaagctgaaacagttcgctttgacgaccaatcattttatgcgtatcatccgaaatcataaataaacaaataagagaggttcccagcctctcttttcttacataacgaaatcgttcgcggaggcaaacatgaacactcctttaaatttacaaaaagaatcattgagggctatagggaatctggatgtgattaatccgcttaaatacaattcgatttattcatgtgatctagtgagtaaagatactttttctcaaattaatgaatgacttagagttcgaaacagctctaatagaagtaatggcattcccttcttttattgaagaatggaagaagaaggttgaaaagaaaatgataaatatgaatactgtatcgaaaaagttcattcatattgaatgtgtcctaaccaaagaagaattgatggcagattacttattagatgaattatattttttagcatcgatcaatgattttgttgttataatagcaaaccctgccaaaaataagtcctgcatgaacctgaacactcaaaaggttgatgtaactactgaaagtaatgaaaaaatcatttggtttgaatacgatgcagcagatttatatatcattgattaatttaatataaatttcaggttcctattcaacggagtgttgctgatgttaaaacttaccgcggagcgtgttgggtcatatgaaagggaaaatatcatttatttcaatgcgggtcgggatgatcaagtatttattgtgtcggtgcacgatcacaaagtaatattggaggttatgaaaggcagctctcttttaatcaaaaaagagttacacggattttctgaagatgcccatttctatctgattgattcgtatgatgacactatcgtgatcgtttacctggagaatcatacgtgtcaattggctgcatactgcgtaaacagtaataaaatcaatccgatttgttcttttctattaagcgccaatgtatttcatctgggtgaggatggattattatggatcggattaacggacgagggtatgtatgatgagagaaatcctcaaggaaaagcgatatttgcttttcatgcagaagacagaacgttttattttgaagacgattttaaagaaatgatgcacgaatgctatgccgtacaatcgatcaaatctgatttgtatgtatgtttcgagggagaggattgctgtgtcatcgggcattatcagattggacgggacagaattcgtactgttgcagaatatgtgctggacggcgatcaatactcctattgtgatcagctatccgtttcgaaaaaaagggtgctgctgattcagagtcacgatgataccctatttgcatttcatgaagagcacaaagagactgacgtcatgatacacggtattgatagaaaaggagaaacaacgtacagagccgtacaggatcgcatgtttatctttagtgataacgatttatatctggtaaagtattgatcaatcctatgcagatggctttttacagccatctgcatatcattttacggagtgaacgatcgatataaataggataccatccaagactcaaggggcaatgacatgaaaataaaaatgaataagatagtcgaagaatcagtaaaaggatgtttttgtcattttgataactgcgggcgtctgtatctcggacggcatcagaatggcgggctttcgtttacgatcatcgacaaatcgggcgatacgcgagtgattcatatcgatgaacaaatcccgtatgaggatattatgctgttccaacagagttcggctgactggtatgtgttgattttctttgaatcgcatgagtataaagtgaaagtattttcagcagaaggaacagaacaaagtgcattttctctcccttcaggggtttcatgcagtcttttggatgaaaaacaaaacctgtggatcggtttaagtgatgaaggtatttatagtgatgaaaatcctgaagggcacagtgtgctgtgcttcactttagacgggcagctaaagaaaacccacattgatcagcagctttcagaaatatatgcgcccgcggtagatgactgttatgcacttgcagaaaaagacggactaatctacatgctgtattacgcttatacagtcattgctgcgtttgaagaaaccgacgtgaaacgagtgtggattatttctgataaagcatattccggggtttacgaccagctagcgatttcagataacgggttttgggtatgcaaagatgatcattcactgtctctcattccggccgatgtcagtctgccgatgcaagagataacgtgctgtgatgcggatggcgatgagctttccgggcatcagctgaagctgactggcgatgccatttacgcggtctcgaattcagggatttataagcgggatatcagtaatgggaaagcggctaaatgagatgttaagatccaacagatattctttaaataatgacgtcatcagaagcttgaaattacacaaaaaagaattagaggggccgctgccttcagatgcagggagattcgaagaagactttgagggtgctgcctgcgctggggatttttatgaatacttcgcacttgtctgcggcagcttagattttgttttggcgaataaacaaatgcctgcacggcagcgtaaagccttatataaatccttttttgagctgtatccgcaatatgcgcagctgaaaaacgctttgatggattatccggagctcagccaggaaatcgggcggcacgaacgggccaggaggctgttagtcagcattttaaacaagaaatgaaaggcaggattttgacgtgaaagaacccacaagagcagaatgtctgaaaaaggctggtctgatcctgaacggtcaagcggcgagggaagaagtgtcggattgggcgtctgagtatgtgagtgcaggtgatccggcggatgaggacgaaaccgtttgggagatgctcgtatatttgagcgggtttgatctgaaagattcgcctgatgcgtatctgcatacgatagaagaattaagagattgggtgcaggaatataaagaagttcatggggatttgtaagaaaaaaattcatttgagtcagacatgtcaattcagctgaaaaaaaggaggcgcaaaatggaatggcacaaacatgagaaagcagttctgccggggccaggttcgccgggttgttttgaattgacggagtttacgttctataccgggtataacgagtattatgataaaatcccggtgtttgagctgaagctgactgacggacagtatgatgccgtgctgcggtttgaggatgtgaggtctgcccggctggatgatcttgaaagcatcaccgacatccatctggatatcagcccagtcgacggcggctgggaatcgatccgctactatgtcgatgacggggaaggaagtatgagcttttattgcgccaaatgggtcgtgctcgacatgaagaaaaagcagtcccccgaacggcccggcaaaacgtcagggtaaagcggcggcatttcgcgtataatgaggggagccggacagagaaggagtttagtcatgaatgagtttaatgaatatgcgatcagccccgagatccgacgggcgctgaatggcttgcaatacaccgagccgactgaagtgcagcggcgcgtcatccccgccgcgctgcaaaaaaaagacctcgtcgtcaaatcgcagacgggcagcggcaaaaccgcggctttcggcattccgatctgcgagcttgcggagtgggaggaaaacaaaccgcaggccctgattttaacgccgacccgcgagcttgcggcgcagattaaagaagatatcacgaatatcggccgtttcaaacggataaaagccacggcggttttcggaaaagcttcttttgacaaacagaaaaccgaactgaagcaaaaaagccacgtcgttgccggaacgccgggacgtgtgcttgatcacatagaaaaagggacgctgccgcttgaacggctggcgtatgtggtgattgacgaagcggatgaaatgctgaatatgggatttattgaacaggtggaagccatcattcagcatctgccgaaaaacagagtcaccatgttgttttcagcgacgctgccggatgacgtcgagaagctgagccgcacatatatgaaagaccctgaattgattgaagtaaaagcggaaggcctgacgacaaaagacattgagcattttgtcaccagaacagaagaagaggataaatcatctttgctgcgtgatgtcctgatcaccgaaaacccggacagctgcatcatattctgccggacaaaagaaagggtcatccagttaaccgatgagctggacaggctgggctacccttgtgataaaattcacggcggcatggtgcaggaagaccgctttgacgtcatgaatgaattcaagcgcggcgagttccgctatctcattgcgaccgacgttgccgccagaggaattgatatcgaaaacatcagcctcgtcatcaattatgatattccgcttgaaaaagaaagctatgtgcaccgcacaggcagaacgggccgcgccggacaccgcggacgggccgttacgtttgtgacgccggctgaatcgcggtttctgaatgacattgagacatatatcggtttccgcatccaaaagcgggaggcgccgtccgagaaagaaacagcggaacggaaagcggcttttgcggaaaaattgaacgcccgccccgatgtcaaaacagacaaaagcgaacagttaaacaaagacatcatgaaactgtactttaacggcgggaaaaagaagaaactcagagcggtcgattttgtcgggacgatcgcgaaaatcgacggcgtttcagccgatgatatcgggattatcacgattctggacaacgcaacatacgtcgaaattctgaacggaaaaggcccgcacgttcttgacatcatgaaaaatacgacggtcaaaggcaaaaaactgaaagtccataaagccaagaaataaaatagaaagcctgccgcgtgcaggctttttttacgccgtttcctcaggcacaaacgcaaggatggcaatgccgatcacaaataacaaaatcaggctgaacacggcggctgacgaatttccggtcagctgggcggtgacggcaatcaaaagcgggccgataatcgaagcgaacttgccgaagatattataaaatccgaaaaactcattggcgttctgtttggggacaagctttgcaaagtaagagcggctcagcgcctgaatacctccttgggaagtggcgacaagcatagccaaaacccagaaatcaaaagcggaatccataaaataagcatacgtgcagacaatcatatacacgccgattccggcataaagcattgtttttcctttaaaccgttcggccagccgctcgtacaaaatcgaaaaaggggcggcgacgacctgtgtgacaaataaaacaatcagcagatttgccgcgctgatgccgaggtcagccccgtatgacgtggacattgtaatgatggtgccgaccccgtcgatatagaagaaataggcgagcagaaacaaaaacagcgcccggtgcttcctgatctgcttcagcgtgccggccagccgtataaaactgctgatcacaagccgcggctccctctcgatataatagcgctggcggacgcggagaaggagcggaatcgaaaacagtccccaccatgccgccgtaattaaaaaggcaatgcggcccgcagtctgggcggacagcggaatcacctccgcttgtgctgacagaatcacggcaatgctcaggagaaaagggattgtactgccgatatagcccagcccaaaccccctggcggacaccatattcatccgctcctttgcggccacatcaacgagaaacgcatcataaaacacattagatccggcaaagccgatcgtggaaatcgtataacaaattaataacagcatccaagattcgccgggaatcaaagccagcgcggcggtgcccgccacaccgatcagaaaaaagaaggcaaaaaaccgtttcttgcatcctttgtagtcggcaatcgttcctaagacggggctgagcatcgccaaaataaaagtcgcggcggcaatcgtatagcccaaataagcggtggaatcagctgcgctgacgccgttttccgccgccgccgctttaaaaaacaaggggaacaccgccgtcataataatgaccgaataagctgaattggcccaatcatacagcatccagctgctttcttctttcgaaaaccgtttcatcacacacgctccttcccaaaaaccggttctctgcattatatgcgcctctgcctcatcgttggacaatgatttctgaacggcgttttctgattgacctggagatattgacctggtacaaaaaggatgtacaatcaaggtgtagcaggtaaatggtcaggcgggagggagacggaattgaagattgcgaaagtcaataataataatgtcgtcagtgtgctcaaagaaggcaatcaggaattggtcatcatgggccggggcattgcttttcaaaagaaaacgggagatccggcagatgaagcccgcattgagaaagtgctcaccctcgataacaaagatgtatccgaagttcaaaacccttttgtatgatattccgatcgagtgtatgaaagtatccgaggagattatcagctatgcgaaattacagcttggcaaaaagctcaacgacagcatctatgtgtcgctgaccgaccatattactttgccattcagcgcaataagaaagggctggatatcaaaacgccttgctgtgggaaacgaagcggctctacaaagacgaatttgcaatcggaaaagaatcgctgatcatggtaaaaaacaagactggcgtgtctctgccggaggatgaagcaggttttattgcgctgcatattgtaaatgccgagctgaatgaggagatgcccaatatcatcagcattacaaaagtcatgcaagagattttgagtatcgtaaaataccattttaagattgaattcaacgaagaatcgcttcactattatcggtttgtcacccacttaaagtttttcgcgcagcgtctttttaacggcacacatcgactttttgctggagaaaaataccgtcgggcgtatgaatgcacgaagaaaatccaaacttgcattgagagggcgtatgagcacaagctcaccagtgacgagctgctgtatttaacgattcacatagaaagggtagtcaaacaagcataatgaaagcgttggcattattgttcttggattcattttttcttacattcacatatgatcttgttaggattgttgctgataagcatgcaaaacctaaattacaatgagcgcggatcatttctgtttgtgctgatggtaatttaggtttttttaagattcgttattatcattattctgaccgatgttcccttttaacagaatcatgtatgatcgataaagaaatcgctctcaaagaaaggggaatgccgacatgttttatcgtatgaaacgagtgctgctcattcttgtcactggattgtttttgagtttgtgtgcgatcacttctgctgcatcagctcaaacaggcggatcgttttttgaaccttttaacagctataactccggtttctggcaaaaagcaaatggttactccaatggagatatgttcaactgcacttggcgtgcaaataatgtatccgtgacgtcatcaggtgaaatgcgtttggcgctgacaagcccgtcttataacaagtttgactgcggggagaaccgctccgctcaaacctatggctatggactttatgaagtcagaatgaaaccggctaaaaacacggggatcgtttcatcgttcttcacttatacaggtccaacggatggtaccccttgggatgagattgatatcgaatttttaggaaaagacacgacaaaggttcaatttaattattatacaaatggcgcgggaaaccatgagaaggttgcggatctcggatttgacgcggccaatgcctatcatacgtatgcgttcgattggcagccgaactctataaaatggtatgtcgatgggcaattaaaacatactgcgacaagccaaatcccgacaacaccgggaaagatcatgatgaacttgtggaatgggataggtgtcgatgactggctcggttcctacaatggtgtaaatccgctatacgctcattatgactgggtgcgctatacaaaaaaataatgtacagaaaaggatttccgccagcggaaatccttttttaattaaaacgaaataatcccaatcaaaagcgccgcaatcgtcatcacaatcgttgttcccacggcccatttaatagtgaatttttgatggtcgccaaagctgacgcctgccattccgaccaatagataggtggatggcacaagcgggctgagcagatgcaccggctgtcccagcaaggaggctcttccgatttcagcggcgtctattccgtaagcggaagcggcttcggcgatgatgggaagaacaccgaagtaaaaggcgtcattcgacatgaaaaaggtgaaaggcatgctggcaatcgccgtgatcaacggcagatgcggacccatggcatcagggatgagggaaacgagagaatgcgccatcgcatcgaccatttttgtgcctgagagaatgcctgtaaatatgcctgccgcaaacaccattgagacaacgtttaacgcattacccgcatgcgccgaaatccgtttctgctgctctttgacatttggatagttaatcatcaaggcgatggcgaacgcgatcataaaaagaacagggatgggaagcaggctggtgatcagcgcggccatcagagcgacagtcagcagcaggttaaaccactggagagcgggacgcttcagcggcgccgcctccggatcagaagacggcgcgtgttcaatcgaaatgatgccgagacgcttccgttctttttttccaaggagataagcaacggcgatcacccagagaacgccggcgatcatagcgggaatcagcggcgtaaaaacttctgacgtgtccaatttcaaggaagccaaaaccctcgccgtcggtccgccccacggaataatattcatgacgcccgaaccgagcatcgcaatccccgccagcaccaaacggttcatgccgagccgtttgtaaaggggcagcattgccgcaatcgtaatcatatacgttgttgtcccatctccgtccagcgaaatggtcatcgtcagaaccgctgtgcctacggcgatttttaacgggtctcctttgacaaacgataagattttggcaatgagaggatcaaacaggcctgagtcgatcataatgccgaaatacaggatggcgaataacagcataatcccggtaggagcgaggtctgtaacaccctgaatcatcatcccgccgagatctttgccaaatccgctgatcagggcaaacacaacaggaacgacaatcaaagcaataagtgcggaaagccggttagacataataaggtacataaaaacaatcatcatcacaaaaccgagtatggcaagcatgatatgacctcccctgttcaacagctgttttggtaagcgctttcacattttgtttctgtgaaaatggcttatttcaaaatgtgtatgaccgcatatgtaaatacagacctaaaatcctaatgagcggatcagcagtttatttaaagaacgccgcgggtaaatgtgctgtagaatgtttcgttttaaaagggggaactgacatgagtgatgatcaaaacaaacgagtaaatgaacactcaaaggacgaacagctggagcagtaccgatctgataacagcggcaaaaaaatgacgaccaatcaggggcttcgcgtgtctgaggatgagcattccttaaaagcgggcgtccgcggccccacgctgatggaggattttcattttcgtgaaaaaatgacgcactttgaccacgagcggattccggaacgggttgttcatgcacgcgggtacggcgttcatgggcattttcaggtgtacgaaccgatgacggaatatacacgggcgaaatttttgcaggacccgtccgtcaaaacacctgttttcgtccgtttctcaacagtggcgggctccaaggggtcagctgacaccgtccgtgacgccaggggatttgcgacgaagttttatactgaagaagggaactatgacctcgtcggaaacaatattccggtgttcttcattcaggacgcgatcaaattcccggatctcgttcacgccataaaaccggaaccgcacaatgaaatgccgcaggctgcgacggctcatgatacgttctgggattttgtcgcaaacaatcctgaatccgcgcacatggtcatgtggacgatgtctgaccgcggcatccctcgaagctatcggatgatggagggcttcggcgtgcatacgttccgtttcgtcaacgagaaaggaaaagcgcgctttgttaaattccactggaaacccgtgctcggcgttcattccctcgtatgggatgaagcgcagaaaattgccgggaaagatcccgatttcaaccgccgcgacctatgggaaacgattgaaaacggcggcaaagtcgagtatgagctcggtgttcagatgattgacgaagaagatgaatttaaatttgatttcgatatccttgatccgacgaagctgtggccggaggagttggttcccgtcaagctgatcggaaaaatgaccctcgaccgcaatcaggacaatgtctttgcggaaacggaacaggtcgcctttcacccgggaaatgtcgtgccgggcattgatttcaccaatgatccgcttcttcaaggccggcttttctcttatacagatacacagctcatccgtcttggcgggccgaattttcacgagattccgatcaatcggccggtctgcccgttccataacaaccaatacgacggctaccaccggatgacgattaataagggccctgtcgcctatcataaaaattccctgcagaacaatgatccgtcgccggcctcagaagaagaaggcggatacgttcattaccaggaaaaagtagaaggcagaaaaatccgccagcgcagtgagagcttcaatgactatttttctcaggccaagatgttctggaacagcatgtctcccgccgagaaagaacatatcatctccgcgttctgttttgaagtcggaaaagtgaacagcaaggatgtgcagcagcaggtggttgatgtcttcagtcacgtcgacgccgggcttgccgagcgtgttgcgaaaggaatcggcgtgaacccgccgccgaaggaccgtgaatctgatgaaacgttcacttccccggccttaagccaggaaaacacggtgaagacggcagcgacaaggcaggttgcggttttaaccgaccacgggttttctgatgagaaagtcaaacaagtgcttgacgcatgcaaacaggcgggagtcagagccgatatcatcagtcctgtgcttggaaccgttaagggagaaaacggcacggagctcgaagcgtcagccacgttcctgacagcggattccgtcctgtacgacgctgttttcattccgggcggaaaacaaagcacagacagcctcaaagcccaaaaatcggccagagacttcgtcaacgaagctttcagccattacaaagcgatcggcgcctccggtgaaggaaaagaacttctcgccctcgccgccggaaccgaaagcggccccggtcttgttccggacggaaaccatgaacaatttctgaaagccgtggctgagcatcggcattgggacagaaacgtataagaatgaaaaagcgcctttgatgagaggggcgcttttttcttgtgaaagaatattgggagaaaacgaaaattgcttccgtacaaatccgtatcttccgctgtcctggacattcagacaacagttttagagagtcagggcatgcgctatttaaagcaggcgggttgatgaaataatagtttcaccctctttggtttacttccgccctgtgtttgtgtatcttaggggtagattttctggaggagcgattgatagtgaagccgtttaccgaaaaacaacttgaagaatattaccggcgtgacgaaaacatgatgattttggtgtttgcccaatggtgcgtcaatcatgaccttgatccgatggccatttacagcaaagcttaccccggacagcctttaaacgaagagctgcgaaaaacggctgaagagcttgtcgtgccgaaggaggaatcagaaccgattcctgatcaaaccgtcatcggcgttttggagatgttcggcaactccgatttggcggaagccgtttatgaagccattgcgcaaagaccttcacggtaaaagaggcgtggattatccatgtctctttttttcatggagaaaatgtgaaagaaggcccagaaacaatttgctgatctgcgctgtctatagagtgtaatccgttttcaaaaagggaacggtaatgaaaaggaggagttgtgatgaaaaaggcattcaaaatgatggcggccgtgctcttaaccgtgctgacagccgcgccgttcggaggtttcgcgccttcagccgaggccgcgcaaactgcaaagcccgtcgtcaaaagccagacgtataagcatgtaaagcagctgacgtaccccgaggtcacaaatacgggaaacgcatcttttgaaaagaaaatcaatcaggacttcaaacgctatattgaaaactcgtaccaagaatatgtaaaaaacaaaaaagacggtgaaaaacaaggctacaaagcggaataccaggcagatttcaaggtgaagtataatcaaggcggcaagctcagcattcagacggaaaactacagttacacaggcggcgcacacgggctgacagccgttcagacctttaattacgacctggccgcaaaaaaacgggtcacactcaatgatgtgctcaatacaaaaacgaaagccaacaaaacgagagactatctttacggctacatcaagaaacatgacgatctgtttgaccaggacgtcaaaaaacaagagatcatcctgaataacgaaagacctttcttctttacgaaaaacggcattgccgttgtgtttggacaatatgatctcggaccatacgcggcaggaatccgggacgttttcgtgcctgcatccgtctatcaataaaaaaaagcgatatcactctaaaacggagcggtatcgctttttttattttaccagacaaacaatccgacaatcgccgcgctcaataaggaaacggcaattccgctgacaagcagcttccagacgttttttccgatgatggctgacttttcaccatcaagcagagattgataagatccgtagatcataccgatggtgctgaagtttgcgaatgatgtcaggaatgtcgtagccacggcaatcgtgtgcggcggaagtgatttcagctgccctttcagatcggccattgccacaaattcattcgtcgcgagcttgatgcccatcagctgtgcgacatacatcgcgtcatgtacgcctaatccgagaaggaaggcaaacggactgaagatgtatgagaaaatcttttgaatggtcaaaccgtgcatgaacagtccgagtacgccgtttaacgcagccgttaacgccacatatccgattaccatcgctaaaataacaatgaccatgttcatgccgacaagcatactgttagaaatcgtggagaagaagtcttttttctccgcttttgaaggaacgtaaataatatcatcctctttagaaacgtccacgggattcagcatattggcgattaaaagcgcgtttaagcaattcagcgggatagctgtaaacacataagtggacggaaccatcgtcaagtacgatccgatgatcgaaccgctgatgctgctcatgctcatcagcccgaatgtcagaagccgattgttgctgacggcggcaagctgctggcggatgacggctaaagcttccgtatttcctaaaaacatcatctggatggagaaaaagctctccagcttcggcagacgggatattttagaaatcagccagccgattttatcaatgagccacggcagaataccgaaatacgacagcatatcaaagaaggtcacgacgaagataatcggcagcaatgcgctgaagaaaaaatcaaccgtcggattggccatgatagacggaaaagcgaacgcaattccttgactggcgcaggaaatcagccatgtaaagaacgcgccgatcttcccgatgacaaagccgccgacttttgtccctaacataaaccaagtaatcagaaactcaaagacgaggagcatgacaatcggacgccatttaatcttcttcttgttgggagaacataagaaaacaacagccatgacaacaatgagaccgacaatgttcaataaaaagtacatgtgagcaactcctataagggtattatggaaataaaaaaagctcttattcgtcacaaattcctgaaagccagaaagtgtgataaataagagccaaaagaaaagaatagactgagagcatcatatgcttttcactcgttcaaatttatgcaaactttcttgtagtctagtcttttacggcactaggtagaaacaatcagaccatattactgatcatatacaagaataacgatattacatgagatagcagtattttatcgtttcaatttttgaaaatcaacctttttagatattttcaaaataataaatttatattataaataaagaaaataaaggatgttcacaagtaattggattaaaaaggtataaaaagcccccgaaaaacagttccggttcattgtaaagacgggatgcagctgataaaatggatctgagggcaccgccttcaaaagacggcagaaaaggggtcattttcatgatcattcagttcattcgttacagataatgagaggtatagataaataggttaaacttccaattttgcgaggtttatttgtctatgcctttttcatttcatcggaataacgaatgaatgaggtgtttttattgacgtctataaaaagaaaacgcgcggaattactgcaatcatgccagtccgtattcaggtgtccgctatgcagttcggccatggcggtctcacaatacaaaagcttgatgtgcggacacgggcatacatttgatatatcaaagcaaggatatgtgaatttcctcaataaatcggtcaaaacccgctatgacaggcagctgttcgaagcgagacgcgctctttttgacagccgggaattttttgggccggttcaaaaggagatcgccgccatcatcagccgcattcaatctccgcaaacaacggcggcgatattggatgcgggatgcggagaaggcactcatttagccgccgtatgcaaattgcttcagcccgctttttccgtgacgggaatcggcattgatctctcgaaagaaggtgtgctgcatgccgcaaaggccttcggggatcatttggtttttgccgtcgctgatgtggcggatgcgccgtttgccgacagctgttttgatgtcgtgatgtctgttttatcaccttggaattacaaggaatgcagcaggcttttacgaaagggcggcacagtcattaaagcggtgccgcggcgtgattatttgaaggaagtaagggaattcttcttcggagacagtcctcggcggaatgacaccgccgattctgcggccggacgattccaagcgggctttcaaacctttgagcgcaaacggctgtgttacacgaagaccttatcgcagcctgaccttgagcggcttgtgaaaatgacgcccttaacatggaaatgtactgatgaaagcatccggcggtttatcagccgaaaagcggcggatattacgatagatatcgatattttaatcggaaccggtcctctgtaaacagaaaagacacgctgatcgcgtgtcttttttttatttccagacttcaccggcaatgttgacgacatgacgcagtttcgcccattgctgttcttctgtgatcaggtttccttcctcagtggaggcgaatccgcattgcgggctgaggcaaagctgatccaggctgacatattgtgaagcttcttcaatccggcgtttaatcgcgtccttgtcttcaagttcgccatgttttgatgtaatcaatccaagcacaagctgaagatcagagcgtttgacatagcggagcggttcaaagccgccggagcgggaatcatcatattccaggaacaatccgtcaaggtcaagcccgtcaaaaatcgtttcagccgctgcatcatagccgccttcagccgtccatgtggattggaagttgccgcggcagatatgcatcgtaaccttcagatcgtcagggcggtccttgatcgcgtcattaatggaagcggcaaacagcttgcgcagctcatccggcgttgtgccgaaatcttcaatctgacgaagccccgcttcagataagaaaacggcccatgcggtgtcatcaagctgaaggtagcggcacccggcgtcatagaaagcctgaatcgcttttttatacgcttttgacacatcgtgctgaaattgtttgtaatcattctggtaggccgctttttccaattttccgcggaaaaacagcatattcggacttgggatggtcattttcggaacagcatcgccggcaatgctgtgcaggaatttataatcttcgagcatcggatgctgagaaaaatcaatatctcccgttactttaatgccgcgcgctttcgtctgtacgttgtgaaactgaatgccgctttcaggcgtaaatgcctcaaccccgtctaaattttcgagaaaatcaaaatgccaccaggcacggcggaattcgccgtcagtcacgacattgaggccggtttctttctgcttttccacgctgcggatgatttctctgttttcgatttcgcgcagctgttctgccgaaatctcacccgccgctctttgcaggcgggcttgcttcacagccgccggccgcagcagacttccgacctgatccgcgcgaaacggcgggttttttcttagaagagtatgcaatggttgttctgtgttttgctgtgacatgaacgattccttctttcctgatgaaatgaaatataaaaaaactcttccctcggatagggaagagcttgcgtccgcaaatctcaaccttatcttcaggatttagcaccattctgctgaacagcggttgccgggtatcatagggccagtccctccacctctcttgataaggaaatatgctatttttcagaataaactgtaatactcttaatcttagtatgttttctcatattgtcaatatatttcgataaatatttttatttgtcaccctcaaatagaatcatatctatcacgatggcgatcgcaagacaaagagcaatatcctcttccttttcaatctgcaaatgataggaatcgccccagctcatccatgatttggtgacggtcatccggtttgattttccgtctgtcacttgaaaattccggccccacacatcgccggtaagattccagccgagtccggaaatttcaaatttcggtttgaaaaacgtgactttcttgatgacttggcagacgggtttgccgctgacggaaatctcgtaacggggaacgagcgacatcagtttctgattgacgctggcgagcgtgcggccgtccaaatcagtcagcttcagttcatcaccgaatgaaaacagctttccttcaacattgtagacttcttttccgctttcaagaaacacttgaaaacgattcttaaacgtaaacattcgctctttgatgtaaaaatggtacataaaaaaactccttttttatgttttacgaaaaaaggaggcggaaggtttcatatcggccgggtgcataaaaaaaggctgccgattttgcggcagctgtcgtttttatgatagcggcatccggcgtttttgacggatcgcatttaaatcaatgatgttattcgtgtcggcagctgtcaccagcgggcttgtctttggcgttttccggcggttgtccttactgaaagagaaaacaagataccctgtcaaagcagcgaaaataagtagcatcattttacatacctcccaaaaaaagttttggtattattattgtacgaaaaaacaaacgaaaagtattcaaacaattgtcacttttttaaaaaataacgtcattttccgtaaaaataactatgggttgaagaaattttgctcttgttgtggttctatagattgtatcggctgatgaatgatgatcgtttatataactttattactattttttgtaagtgtctaattaactacttcggtgttttcgtttgccttgtgttattcagtaccctaaaaaaccttatgatatgcaaaataactgcttctaacagatgactgcgagttgacagcgctttctttatttttttaaagaaaacgagatgttatcttaaaaaaatcgtttgaacattttccgcagttttttaaaagggtttgattttgtctccagtacacgcgggtcttttaaggtttttttcaattctttcgctacagtccctcttgccatagtcttcactccttctttccatttcataccttatatacggaaagaaagaaggaaaggtttcatgtgaaagaaaaaaaccaaagcagggggctttggttttaagcgcgctcttcaaagagcctggcgatttcaacaatgacgtttaccgccttttccatatgatcgacggaaatgtattcatattttccgtggaagttttggccgcccgtgaaaatgttcggtgtcggcagtcccatgtaagagagctgtgagccgtcggttccgccccggatcggttcgataatcggttcgatgtcgaggtttttcatggcttgatacgcgacatcgactatctctttgaccggttcgattttttctctcatgttgtaatattgatcacgcagttcaagcttgatgctttccttgccgtatttggccgccagcgcatcggcggttttctgcatatattcttttcgttctgcgaagcggtctctgtcaaaatctctgatgatgtacgacagggcggcttcagaaacgtctccgtccatggaaagtaaatgatagaagccttcatacccttccgtatattccggcgcttcttctttcggcagcgcgtgatgaaattccatcgcgatttttgaagcgttgaccattttgtttttcgccgttcccgggtggacgctttttccgtaacaagtaagctttgcggcggctgcgttaaagctttcatattgcagttcgccgagggggcctccgtctatcgtgtaggcgaacgcggcgttgaagcggccgacatcgaatttgtgagggcctctgccgatttcttcatcaggcgtgaacgcgacccggatcgttccgtgcttgatgtccggatgtttgatcaagtacgccattgccgtcatgatttcggcaatgcccgctttgttgtcggctccgagcagcgtcgtgccgtctgttgtaatcagcgtctggcctttatagcgggaaagttccgggaattgctcaggcgacaggacgacattgagtttgtcattcagaacgatatcatgcccgtcgtagctttcaataatctgaggattcacattttttccggtaaaatcggtcgcggtatccacgtgagccagaaaaccgacagtcggcacgtctttatccgtattcgccggcagagtcgccatgacgtacccgttgtcatcgactgtaatttctgtcatgccgatcgactttaattcatctgccagcatgttggccaatgtcagctggccgggggttgaagggcagttttcattgttttcgtcagactgtgtatcgacttttacgtaagaggtaaagcgttcaatgatttcatttttcataccgtcatctcctttgtcttatcttaccatgcgcgggggagggatttctatttcacaacccgtttgaatcgagggctctgttttttacgcgaatgaaaataaattatgaagaaacgatgactaaacgattaaactttttggaaatggatgattgaggaagaaaaaaccgatataatatggtcaattcattcaataggggaggctttcttcatggcgattttagtgacaggcggagcgggttatatcggaagccacacatgtgtcgagctgttaaacggcggctatgacatcgtggttctggataatctgtcaaacagttcaccggaagcattggagcgtgtgaaagacattaccggaaaagggcttgtgttttatgaagcggatctccttgaccgtgccgccgttcaccgggtgtttgctgaaaatgagattgaagccgtcattcattttgcgggattaaaagccgtcggtgagtctgtggctgttccgctccgttattatcataataatctgacgggaacgtttattttatgtgaagccatgcaggcacacggtgtgaaaaaaatcgtcttcagttcttcagcgacggtttacggcgttccggaaacaacgccgatcactgaggattttcctttaagcgccaccaatccttacgggcagacaaagctgatgctggaacagattttacgcgatctgcataatgcggactctgaatggagcattgcgctgctccgctactttaatccgttcggcgcgcacccgagcggccggatcggagaagacccgaacggcatcccgaataatttaatgccgtacgtcgcacaagtcgctgtgggcaagcttgagcgattgcaggtgttcggcaatgattatccgacaaaggacggcaccggcgtgcgggattacatccatgtcgttgaccttgccgagggccatgtcaaagcgctcgaaaaggtgctgaacacaacgggcgccgacgcctataatctcggcacaggaagaggctacagcgttctggagatggtcaaggcgtttgaaaaagtatcaggaaaagaagtgccgtaccgttttgccgaccggcgcccgggagacatcgccgcatgcttcgcagacccggcaaaagcgaaggctgaattaggctgggaagcaaagcgcgggcttgaagaaatgtgcgccgactcttggaagtggcagtcctccaatgtgaacgggtaccaaaaggtgtaaaaagaaagagaccttcaaatgatgagggtctcttttgttatgatgattatttaattttcacttcaacatcgttgctgaactttaatttccaagtgcctttagagtatgcgtttttatccacttcaaaagcttttacgtcagtcactttaatgttcgggttcaagtcacttaaaattttactgttgtctacttttgtttctgttgcatagcttgaagaagcatcaatatctgaatcataagatgttcctttagaatctactaatttcgctcttggaatggagaaagagcttaacggcttgtttgaaacatttttaaccgtgtattgaacagctacgataacgccgccgtcagacgcttttttctcgacaaattgagagcctactgaatctcttttttccactttcgtaacagtaacttcagttttctcagtcttaacagtgtcaccgatgttatacagtttttctttagattccgcagcttttgaagacgcagttttagatgacgaagaaccgcctccgccgccgatgtttacgagaatgataataaccaccactgccagaagcaatgtgatgattttatgtctcatgaaaaagtttctctgatctttaccgcagtttgggcattttttaacgcctttagcgatttctttgccgcatgccttacaagacaccaggttgcctgccataatatttcctcctatgtaaactatttcttaaaaactacatactataatgcctgtaaaataacctatagtcaataatattttgagaaaaaaagtattttaatgattttttagtcatgtattttaaggtcctttttagtatcggcagatcgttcgcattttccataggtttaatgaaaaaagagtggttgaacatgttcgtgatttcccgtataatcttgaaagataatataaaaactgaacataaaaaacagtggttttctagggttccgcaatgctgaattggtctggaccgagagaaaacacacagcaggttcctgctgtgacacgttgggataaaagcccgggagtttctgctcttttaatgaagagtgctctcccgggcttttttgattttataaaaaagggagtgtctgggatgaaaaagagattgctggatgtgctgatgctgattattggagcttttatctttgctttggccgttaatttattcgccattccgaatgatcttggagagggcggggtaacgggaatcaccctgatcttgtactatgtgtttgaatggtcgcccggggtgacgaatatcattttgaacgggattttattgattatcggatataaatttttagacggaaaaacaacgctttatacgatcattaccgttgtcgccaactcactgtttctgcatctgacgcatgattggcactcgccttcacatgaactcattattaatactatttttgcgggtgtgtttgccggtgtcggaatcgggatcattattcgagtcggtggcacgactgcgggttctgccattttggcgaggattgcgaacaaatatctcgattggaatatcagctatgcgcttttgttctttgatctgattgtcgtcttcagttcttatttcatcatcggtgcggaaaaaatgatgtttaccattgttatgctgtacatcggaacgaaggtgatggactttatcattgaaggcctgaatacgaaaaaagcggtgacaattatatctgagcataagcacgaaatcgctgaacaggtcaacacgctgatggacagaggggttacgctgctgtcgggtaaaggaaattacacggggcagtcgaaggaaattttatatatcgtcatccagaaacaagagctttccatgctcaaaaaaattattaaaagctgtgatacaaaagcgtttgtcattgttcatgatgtgcgtgatgtctttggtgaaggcttcgtcgatatctctaaataaaaaggatccctctgccggcgcggagggtttttttcttatgccggcagaagcggttatatccgtttcccgggaaatagcctgaaagctgtttcttaaaacgaagtggatacaatcggccggacgttttatactgaaaatatgatagagcgatagaaaggagcgcatatgaacccgttattggcaatttacccgagggctgtgttgtctgatacgtgctgtacggcggaggatgtcttttgcttttatgatgagaaaaggcgggtctatgtcgccattccgaaggaggatatcaccccgaaggagaaactgcttctggaatcatttttgacgcccgctgaagaaaaaggcgttttttttccggagacggcggcagcaaagaggtggcggcgttttctgctggaagaaggtccggtgcctgatgtcaaggagccgcgtgtccgttttatccattatgacttattgggagaacgggactggggggcattcacagaagcgctgcgccatttctggccggtttcatatacagttgtccggacggggagggatcatggcgtgattgtggaggaagaaaagctggaagcgccagattcggatgacatcgcatcttttgtgaagattctcgaaggcgatttttatttcagtgtccgttttttcgtcggaaggtattactgcaagggggaacgtctgcgccttcattatcagagagaacagcaatattgtcagatcggccggcgtcatctcccgcagctgagcacgctgaccgcggaaacggtatttccggccatgctcacggaggaaagcagagaaaagctctcagccttgcttcacgaagaagcggcgctgctgtttcagaaagaaccggagctgaagcatacgattcagacttttattgaacataactcaaacatgtcgctcacatcgaaaaaactgcatttgcaccgcaacagtcttcaatatcggattgataaatttgcggaacgctcaggtattgatattaagacatatcggggcgccctgctggcttatttcatttgtctgcaatatgaaaaatcacattaaatgggaaatgtgcacgaagacagcggtctttttttatgaacattgcctatatccgccgccgtctgacgctgttacaatcctatttaagaaagcgtttacaaataaagggggatatacatggcggaacttcggctcgagcatatttataagtattacgatcaaaaagaagcggctgtcgatgattttaaccttcatattaaagataaagagtttatcgtgtttgtcggtccgtcaggttgcggcaagtcgacaactttgcggatggtagccgggctggaagacattacgaagggcgatttctatatcggtgacacgagagtgaatgacatcgctcctaaagacagggatatcgccatggtgtttcaaaactatgcgttatatccgcacatgacggtctatgataatatcgcattcggtctgaagctgaggaagatgccgaaaccggagattaaaaaacgtgtcgaagaagcggcgaaaatgctggggctcacagagtatctgcaccgcaaaccgaaggcgctctccggcggacagcgtcagcgggttgcattagggcgggcgattgtcagggacgccaaagtgttcttaatggatgagccgctgtcaaatctggacgcaaagcttcgggtgcagatgcgggcagaaattattaagctccaccaaaggctgcaaacaaccacaatctatgtgacgcacgaccaaacagaagcactgacgatggcgacacgcatcgtagtcatgaaggacggaaaaattcagcagatcggcaccccgaaagaagtgtatgaacatcccgaaaacgtatttgtcggcgggttcatcggttctccggcgatgaactttttcaaaggaaagctgacggacggcgccattcagatcggttcagccgctctcagcgtgccggaagggaaaatgaaaatgctccgggaaaaagggtatgccggcaaagatatcatcttcggcatccgcccggaagacatacatgacgagctgattgtggtagaatcttataagaattcatccatcacagctaaaatcaatgtcgcggaattgcttgggtcagaaattatggtttattcccggatcggggatcaggattttatcgcccggattgacgcccgccatgacattcgtgccggtgaggaattgaccgtcgctttcgacatgaataaggctcacttttttgacagtgaaacagaaatcagaatccgctcataacgcaaagccggacagctggatgtccggtttttttgatgtaacaatttatgacgcataaccgatataaaaagtaaatagaagacagaaagcaggaaaacgatgaaacgcatgatcatgtgcatgtgccttttggctgccgtgtttacacttgccgcctgctcgggtcatgaggcaagcgccgaacaaagcattccgaaggcagaagcgcacagcgaaaaaaagtccgtaaagcggcaaatcaaaaaagagccggatacgtccgcctgggttcaaacgaaagggatggcgagactgccgattctgatgtatcacagcatttcagagggaaacagcctgcgtgtgccgaaggaagaattccggcagcatatgaagtggcttcatgatcacggctattatacgatgactcctgaagaggcctatctgatgctgacggaggataaggagccgcgtgaaaaatgtgttctggtcacatttgatgacggctatacagacaatgtgaaagcggcctatcccattttaaagaaatacaagatgaaagcgacaatctttatgatcggaaactttatcgggcataagaatcatctgactgagaagcagatgaaggagatggccgcccacggcatttccattcagagccatacgatgaaccatctcgaattgaacgggctcacaccgcagcagcagcgacgtgaaatgaaggactctaagcgtttatttgatcaaatgttcgggcagcggacgtctatgatcagctaccctgtcggacgatataataaagaaacattaaaagccgccgcctcgtcaggctaccgtatggcggtcacgacggagccgggagcggcgtctagagatcaggggctttacgggcttcaccgcgtccgtgtgtcgccgggcatgtccggcgcggcattcggctcttatattcaaaatgtgatgaaataacagagcctccgcatatgcggaggctttttttcagtttaatagaattgatgaagcagcagaagggtgacgctcacggtaatcgctccgccgattctggtcgacacttgggcgaacggcataagctcaagccgttcagcggcgctcaagatcgcgacgtcgccggtgccgccctggccggaatggcaggcattaataaccgccgtttcaatcgggtacagattcagccattttccggtcagaaaaccgacggccatcatcgtgacgacgattgataaaatggtaatgatgttgctgattgtaaacgccgcaatcagcttgtcccacggtgtcattgaaacgccgatcgcaaataagagcggataggtcacggctgtcgagaaaaagcgcgagacgccgaaggctccgttttcaatcgaagccggcgccagcctgaacagcttaatgagaacggcaaggacgagcatcacgactggagccggaagctgaaagaaatcatgcgccagcatgccgaccaaataaagggaaaccgctaaaataccgcccgaagcgaaaaaggacaaatcaaacgttttatcatcggccggctgttccaatgcgggagcggaatgatcagacttatcaaccttcccgttgcccgtccattccggtttgcgtttcccgatgacattcagcaaacccgataacataatggcgcacaggctgccgagcatgatggacggcagcacaagcgcaaaggcgtctccctgggacatcggcataatatcggagtagccgatggataaaggaatcgcgccttcaccgacaccccccgccataatcggaacgacgatataaagcagcgtgtgctgaaagccgagcccgagcagcgtcccgacgcataagccgacgatggcggccgcgatagacccggcgatcagcggaataaaaatcttaacgaaagctttgacgagcgtctctcttttcatcccgagaatactgccgacgacgataccggcaataaatagatagagaaagttggagctttccgtgaattctgttgttgaagtaataatgtctttcggaagcaggtggtagtagacgacagcggatggaataaaggttgcgagaatcgcagggccgccgatggaccgcacgatcggaatggattttccgatctggccgaaggtaaatccgaaaaaactcatgacggcaattgatgtcagaatgtcgctttttacatcacggctcatgacaaacaccgtaataagcaagaaaagcaggatatagataggaagaggaataatgccgattcttatattcattgctctggcaaaccagttatcagtccgttcctgtttttggattgaatccgtttgcaattttggttgaagttctcccatgcttgttcccccagtcgttatgtagtgaaaaaatatccccatttaaagtatactaaaaaatttaaattgttcatatattatgaatttactagaggacatgctttcttcacattttctttctcaaaatggcgatttggcgggctttttcaccgagaaaagcattttgttcgccacacgaataaaaaagaggtacgatatcaaagggacaaatatcctaggtgctgacataaaatctctacaaatccgacaataatcagtcacaatttcagcctgattttaggtatattgatctttttttttgggctgaatcgttgtaaagtaatgatattgaatcatttctatgacagccgctgtcccccagggtgtacaggctgatatttcaatagttttgacgaatttgtgaaacattgagcaaatatatcattttttgtgaaataccgagcaatgatttcactatgtttgtgaaatgttgagcaatttaccagattggaggaaaaacatcatgagtgagttggtattagcccgcattcaatttgcatctacaacattgtttcacttcttgtttgtgcctatgtctatcgggcttgtgtttatggttgctttgatggagacgctttatgttgtcaaaaaacaagagacctatctcaaaatggctaaattttgggggcatctctttttaattaactttgctgtcggcgtcgtcacagggattcttcaggaattccagttcggattgaactggtctgattattcccgttttgtcggggacgtatttggggctccgcttgcgattgaagcgcttttggcgttttttatggagtctatttttatcggattatggattttcggctgggaccgtttatctaaaaaagtgcatttgctttgcatttggcttgtatccttcggaacgattatgtcatctttctggattttgacggcaaactcattcatgcaggagccggtcggctttacgattaaaaacggccgcgcggaaatgaatgacttcggagcgcttttgacaaaccctcagctttgggttgaattccctcacgtcattttcggagcgcttgcgacgggtgctttctttatcgccggtgtcagcgcatttaaattattgaagaaaaaagaagtgcctttcttccataaatctttcaagctttcgatgattgtcggtctgatcgccggtatcggcgttgcgttcagcggacacatgcaggctgagcatttaatggaatcgcagccgatgaaaatggccgccagtgaagcgctttgggatgacagcggtgatcctgccgcgtggacggcttttgcgaatattgatacgaataaagaaaaaaacacatcagaaatttcaattccttacgcactgagctacttggcttaccagaagttcagcggcagtgtgaaagggatgaaaacacttcaaaaagaatatgaaaaaacgtacggaaaaggcgactatatcccgcctgttaaaacgacgttctggagtttccgcattatggcgggagcgggtgcgcttatgatttttgccgcgattgcaggctttattctgaaccgccgcaaaaagcttcatacgagcaagtggtatttacggggcatgatcgcactgatcgcattcccgttcattgcgaactctgccggatggattatgactgaaatcggccgccagccgtggacggttatggggcaaatgacaaccgcacaatccgtttcgcctaacgtaacgacgggatctctgctgttttcaattatcggtttcggcgtcatgtacttgattttaggcgcgctgcttgtcttcctattcgttcgtgaaattaaaaaaggtgcggaccatgatgatcacaaggatgttcctgtatcaacggatccgttcagtcaggaggtctaccatggggtcacttcatgatctttggtttgtactcgtttcagttttgtttgtcggatttttctttttagaaggttttgatttcggtgtcggcatttcgacccgatttcttggccataatgaattagaacgcagagtgctgattaacaccatcggcccgttctgggatgcgaatgaggtatggctgctgacaggtacgggagcgatcttcgcggcattcccgaactggtatgcgacgatgctgagcggatattatattccgtttatcatcatccttcttgctttaatgggccgcggggtggcgtttgaattccgcggaaaagtgaatcatttaaaatgggtcaaaacatgggactgggtgattttcttcggcagccttatcccgccgtttgtattcggccttatcttcacaagcttgttccgcggcatgccgattgacggccatatgaatatgcatgcgggtttctcagatattgtgaacgtgtattccgtccttggcggagcagccgtcacccttctttcattcctgcacggtttaatgtttgtcacactgcgcacgatcggtgatttacaagagcgtgcgagaaaaatggcaaaacgcgtaatcggtgttatctttcttgttgtacttgctttctttgcgatgtctgcatacgatacggatatgtttacacgccgggcaaacatcacgattccggtattcgtgctgattgtcatctgcaacgttcttgctgttgtgttcatgagcaagaaaaaagacggctgggcattcggtatgaccggcgcgggtcttgctttgacagttgcgatgatttttatctctctgttccctcgcgtcatggtcagctcgctgaaaagcgcgtatgacttaacagtagctaacgcgtcttccggtgattattcacttaaggtcatgacaattgttgcactgactctgctgccgtttgtcatcggcagtcagatctggagctattatgtcttccggaaacgcgtcagccataaggagcctatgacttattaatgggaaaagacctgtttctttataaaggaatgaagcggattcttgcgatcattacgggattaacgattatacaaacggccgccatcatcttgcaggcggaatggctgagccaggcggtaaccggattatttaacgggaagcggattgcttctctttatccggttatcggctttttcctgcttgcgtttttggtccggcatgcggtaaccgcggtccggcagaaaatcgtgtaccaatatgccgcgcaaaccggcgcagacttaagaaaaagatttcttgagcaattgttccgtctcggcccccgctttgcgaaaaaagaggggacgggccggatggtgacgctggcgatggaaggcatcagccagttccgccgttatttagagctgtttctgccgaaaatggtcagcatggcgattgtgccggcggccgttgttatttacgtgttttttcaggataaaacatcggctttgattctgattcttgcgcttccgattttgattgtatttatgatcctgctcggacttgtcgcacagaaaaaagccgatcgccaatggaagtcctatcagacgctttccaatcatttcgtggattcgctccgcggactggagacattgcggtttttagggttaagcaaatcacacagtaaaaacatctttcatgtcagtgagagataccgcaaggcgacgatgagcacgctccgggtcgcgtttttatcatcattcgccctggatttctttacgatgctgtcggtggcgacagtggctgtgtttctcggcctgcggctgatagacggacaaattctgctcggtccggcattgacagcgctgattctcgcgcctgaatattttctcccggtccgcgaagtgggaaatgattaccacgcgacgttaaacgggcaggaggcggggaaaaccattcaagcgattttggcgcagcccggttttaaagaagaaaagccgctcgaacttgatacgtggactgacggggatgaattacagcttacgcgtttgtccgtccgagaatcgatgtctgaatttcatctgtcctttaaagggaagaagaaaatcggaattatcggggaaagcggtgcgggaaaatcgacactcattgatgtgctgggcggctttttagagcctgcgtccggtgagatcaaggtaaacggtgaatcccgctcgcatctgcagtcagacggctggcagaagcagctgctttatatcccgcagcatccgtacatttttgatgacacgcttatgaataatatccggttttatcatcctgatgcttcccgtgaggaaacggcgcgcgctgctgattcagcgggtctttccggactgatccgcgatctgcccggcggccttgacggccggatcggcgagggcggacgggcgctcagcggagggcaggctcagcgtgtcgcgctggccagagcctttttaggaaaccggccgattctccttttggatgagccgaccgctcaccttgatattgaaacagaatatgaaataaaagaaacgatgaaagacctgtttgaaaacaaacttgtctttctggccactcaccgtcttcactggatgcttgagatggacgaaattatcgtgcttgatgacggcgcggtggcggaaatcggcacccacgacgaattgatggcgaaacaaggcgtatatgccaaacttgtaaaggcgcaactgggggaaagaacatgagaaaagaagaatggattctgccgtatataaagcaaaatgcccgtttgtttgttcttgtgatttttttaggcgcggtgacgattttttcggcggcctttctcatgttcacttccggttttttgatctctaagtcggcgacaaggcctgagaatatcctgctggtgtacgttccgattgtggccgtgcgcaccttcgggattgcccgttcagtctcacggtacgccgagcgcctgacggggcaccatatcattttgaaaatcgtgtccgatatgagggtgcggctttacaatatgctggagccggcctcgctcatgctttcatcccgttttcggacgggcgacatgctcggcattttggctgaggatattgagcatttgcaggatgcgtttttaaaaacgattttcccggcggtttccgctttgctgctgtatgcggcatccgttatcggactcggctttttttcctggccgtttgccgcttttgcggcgatttacctgtttatattggttgtattgtttccggttgtgtcgcttcttgtgacgagagcgaaaaacatgaggctgaaaagcggccggaatacgctctacagccggctgacagatgccgtgctcggcgtgagcgactggatgttctcgggacgacaggcggcctttatttcctcttatgaagagaaagagaaggcatggtttgaccttgaaagcaaacgtcagcggtttacgagatggcgtgatctcgccgcgcaatgccttgtcggcggcttcatattgatcatgctgttctggacggcgggtcagtatgcggacggcagcatcgccaacacgatgatcgcagcctttgtgcttgtcgtatttccattgacggaggcgtttctgcccctttcggatgcgctgacggaagtgccttcttatcaggattccatcaaaagaatgagtaaggcggctccggagctgcgaagtcgtgaggtgaagcagacagatgagatactggatgtatccgatgtgacacttacatttgataacgtgacgttttcttatgatcagcacagtcatgtgcttgaccgtttttccttcactctccgccagggggaaaaaatggcgctgctcggcaggagcggctccggtaagtcgacctctctcgctttaattgaaggcgccttagttcccgattcgggcaaggtgatgctgaacgggctggaaactgcggccgtgcaggagcagatttcctcagcggtggccgttttgaatcagaaacctcatctctttaacacgagcattatgaacaatatccggctcggaaacggcaaggcgagtgatgaagatgttaagcgtgcggctcggcaagtgaagctgcatgattatattgaatcactgcctgacggatatgaaacgtccgtgcaggagacggggattcgtttctcaggcggggaacggcagcggatcgcgcttgcccgtattctgctccaagacacgccggtcattatccttgatgaaccgacgatcggccttgatgcggtcactgaacgagaattgcttgatacgatttttgatgtctttaaagagaaaacgatcctctggattacacaccatttagcgggtgtggaaacagctgataaaatcgtctttttagaaaatggaaaagcagaaatggaaggaacccatcaagagctgcttgcagaaaacgaacggtaccggaagctttaccgtcttgatgttccgatcagaacataaacagccgcaaacgagcggctgtttttttgtgcggtttaaaatctcttcttgtttggaatataaataggagacagaagaggaggtacagagatgaatataatggattggacggaacaggatgtgaaagatacgctgccgaaacgggaggcggacagccataaaggcacgttcgggacggcgttattgctggccgggagcgatgacatgccgggagccgcccttctagccggattgggtgcgatgagaagcggtgtcggcaagctcgtcatcggtacatcggcaggcgtcattccgcttatcgtcccggtgctgccggaagccacgtactggcgggacgggtggataaaagccgcggcgggccagcccggggaaaccatccgggccgctgccatcgggccgggccttccccaaacagacgaggtgcagcaggcggctgatcagctgctttctggcgattatcccgtcatactggatgcgggcgccattacgaaaagaacctatccgaagaggaaagctcccgtgatcttgacgcctcatcccggcgaattttccagaatgacaggccttccgattcaagagattcagcagaacagagcggaatatgccgcggaatgggcggagcggcttcatgtcacgattgtcctgaaaggaaacgaaaccattatcgcttttcccgacggggaatgccgcaggaatacaaccggaaacggcgcgcttgcaaaaggcgggaccggcgacacgctgtcgggaatgattctcggcatgctgtgctgtcatcaagacccgaagcacgccgtattgaacgccgtccgccttcacggcgaatgtgcggaattatggacgaaagagcgctccgcccataccttattggcgcacgaactttctgaactgctgccgggtgtatggaaggaatatgaataaagaaaaggcgtcttcatagggaaggcgcctctttttgttttaaccttgatttcatcaggacataatacagcagcgacggaacggccaggccgatgacccaggcaatgtcgcctccgccgaatatttcagcgagcggcccgatgtaaaaggatgtattgatgaacgggatttctaatataatcgacaaaacgaaggcggccgctgtaatccaattgaccctgccgtattgtccgttgacgtcaaacatcgatttgacgtggtattttccgcggcggataaaatagtaatccacgaggttgatcgccgtccatggaattaagaaataactgatgaaaaagatgaaatttaaaaacagttccatgaaattgctttggcccaagagacttaatacagtacccgctgccgtcacacaaaggatcattaccactctcgttttcggcgtcaccttcagttttaaaaacggctccaaggtagtcgtggttgacataaaggctccgtataaattaaagacgttgatcgccatttgcccgaacaggacgatgatcagcataataaaggaaaacggaccgaacaatcggacaatctcatttcccgcattagcggtaaattccgggagcgccgtcgtcaaaatggcgccgagaagcatcatccagatggaactgactgacgtacctgcatagctgtaccaaaaagtatgcgatgccggtgttttgaccggcagataacgggaataatctgcgacatatggcgcgtatgccagctgccatgtggccaccgcgctgaccgccactagaaaaacaggcagatctaatgagccgggcacccagcttcctgaaggaatcggcagttgaaaaataagaatcgttgcagcaaaaaaaacggcaaaggaggtccaagagaggattttctgcattttgtgaatcagatcatgaccgtagatcgtgagtaaaaaacagatggcgcttaagccgataatacaccatgaagccggaatcgggacaaagctgctcagtgtaccggctgcgagaatcgtactgctcgcaaagaagcccaggtagataaacatgaccaaaaagaggggcagaatcgctccgatcacgccgaattgcgcgcggctttgaatcatttgcggaattccgagctgaggtccttgtgcggaatgagacgccataaagattgcgccgataaaggttccgatcacaatggcggcgatactccaaaagagatcgagtcccattgtaacgggcagtgtgcctgtgactaacgtcgtaatatgcatattagccccgaaccagacggggaataaatctttagcctttccgtgtctttcgtcatgcggaatatgttcaatcgttcgcctttctactttcaatagataatctcctccgtatgttcttctttaacataaagacatagcttaacagattgacctgccgtttacaaattccagcatgcaggaaaaacattgtaaagcctcgctgacagccgttcaaagttttttgaaaaacggaacaaacactgccgcctaaacgatttaccagggattaaaaggtatggatatgcttactgactaatatgtatgaaggagaaatgtgtcaatcttttgacgaatggagccattattcgttaagctgaaagaatagtttactttgtgtaaatttcattaatgaaaaggggattgatgatatgtgtacaagtcttacattgaaaacgacagacggcaatcacctattggcgcgaacgatggattttgcatttcagctcggtacggacgtcgtgctttaccctcgtcagtacagctggaaaagcgaagctgacggcaggatgcataagacgaaatacgcatttatcggcatggggagaaatctcggcaatgttctgtttgccgacggcgtaaatgaaaaagggctgtcgtgtgcgacgctgtattttccgggctttgcgggatacgagaaagcggaacgggagggcacctgtcacatcgctcctcatgagtttgtcacctgggccttatcaaactgtgaatctcttgaagacataaaggaaaagctctcaatgctgacgattgtagagaagaagttaatgttattggatacggtgctgcctcttcattggattttatcagaccgcacgggcggctgcattgtcatcgagccgacaccggagggaatgaaagtatatgacaacaaacccggagtgatgaccaacagtccggaatttccttggcatgtgaccaatctgcgccattatatcggaatcaggccgcagcagtcagaaagcaaaacattgggcggaatgacattaaccgctttcggccaaggatctggaacgatcgggcttcccggtgattacacgccgccatcccggttcatcagagccgcttatctgaaagagcatttagagcctgccgctcatgaaacggatggcgttacggccgcttttcacgtgctgtccaatgtgaatattccaaaaggcgcggtgatcacagaggagaatgaaattgattatacgcaatatacgtcggtcatgtgctgtgacaccgggaactactactttcatctgtacgacaaccggcagattcacaaagtaagtttattccatgaagatcttgaccgtccggagccgaaagtatttgcggccgcggcggagcagaatatacaggagctgaattagctcaaaaaaaaaacaggacgcgattgtcctgtttttttatttaatacggatcagacggatggctttcctgttcagcctgttttgcggcttgtgctgtatcagtagtgccgatcggcccgccgctgctgctttcggaggcttttttcagcccttccgcaacacgttttccgtagtccggatctgcttttgtgaaattctcaatcatttgatcctgaatgtctttccggcaggaagaaagcgtattgaccaggtttgtgatcaattcggtccgttcaaattccgaaaatctgcggtatgtttcaccggcctggccgaagttattcggccggtcgatcgcttcccgcttcacatcgccttcgacatgaggtgtatggtctttcccatcctgctttgcttcggtgagtcctcccataatggacggctcatagttgacgtgcgggttttgtccttctgcccgatcgacccgatactgcatttgcccgccttcctggttggtggcgacatgctttttcggcgagttgatcgggagctgcaggtaatttgcgccgacgcggtaccgctgggtatctgaataggcgaatgtccgtccctgaagtaatttgtcatctgaaaaatcaaggccgtccacaagcacgcccgttccgaatgatgcttgttccacctcggcatggtagttttccgggtttttgttcagaaccaatttgccgatcggcttccaagggaaatcgtctttataccacagcttggtcggatcaagcggatcaaaatccagctcgggatgctcgtcatcagtcatgatttgcgcatacacttcccattcagggtaatcgcctttttcaatcgcctcatacaaatcctgtgtcgcatggttaaagtttttcccctgaatctcttccgcttccttctgtgtcaggttgcgtatgccctgtttcggttcaaagtgatatttgacgagcacggcttttccttcttcattgacccatttgtaggcatggacgcctgagccctgcatctgccggtagttggccgggatgccccacggcgaaaacaagaaagtgatcatatgagtcgcttccggtgattgggaaatgaagtcgaaaatacgctcgccgtcctgaatgttcgtaacgggatcaggctgaaatgcgtgcacaagatccgggaacttcagcggatcacggataaaaaagattttcaggttgttgccgaccagatcccagttgccgtcttcggtataaagcttaacggcaaaaccccggggatcacgcaatgtttccggggaatgcttcccgtggttgacggtagagaaccgcacaaacgccggagttttcgttcctttcttttgaaacactttcgctcttgtatatttagaaatctcctcgtctccaaaacttccgtacgcctcaaagtatccgtgtgcgccggcgccgcgcgcgtgaacgacgcgctcgggaatccgttcgcggtcaaagtggctgattttctccaaaaaatcataattctccaatgtcgtcggtcctctattgccgactgtcctgacattctggttgtcagtgaccggatggccctgccggtttgtcagcgtgtcttctgactcgcctttaccggtcgtcttactggaaagcgtttcttcgctgtttttgttattttccattgttgaaccctcctttttgaacggtaacaatatgcccagcagagccgttttttaaaaccgattttcaaaagaagcggttattccgcgatcggcgtcaaggacccgccgttccatatttcgcccttgttcagcgtccagctgttttgataaaggctttgcgcgccttgattggccgccggacttaattgttcatcccatgtcaaaaagtacgcggtctgagggtatttttgcctgatcgcattaataaaagcagcataatcaaagcttccgatattgccggacggaccggtttcggcaaaggcaaacggttttttcagagacagcatttcatcatagcctgatatcgcatacggatcagtgaagtaagcgtccagaccggtaatatccacataagatgagcctgggtagaagtctgttttaaagtctctgttggcatccggcgaatacacccacaaaaggttatccaatcctcttgtctctgtcatatagcggtatatcttcttgtaaagctctttgtacagcgagattctctcattgtctttttggttgtagcctgtcagcccccaccagaaccactcgccgttcatttcatgcagcggtctgaacagaacggtgacgccttgatttttcagctgagtaaggccgtcggcaattttgctgagcagcgcctcaagccgttttccttccacagttgaagggtcaaggatgtttttgtactggctgtttgagatggccgttttatagtttccggatggaaaggccggatttgcgagatgcaggctgacctgagggaggccgccgcttttccagtatgagattaagctgctgttgcagctgtaatcgatagtatcggtgatatccgctgtttccagccaccctctcccatagtcacagccgtagatggcgggagactgtcccgtcgcgtttttcaagcggttttcctctgtcattgaaaaagtgacatcactgtacccgccgaacgctccggacatgaccctgttttctgaacggttgggcaggtgggccagccagttcatgatatcttttgtcgtctgctgggcatttgggttgacgggataaacggtgtgagccgatatcggactggcggctcctaagagtaataaaacgatagacaggcagactgctaactttttaagcatataaaagacctcctgatttttaagatgatgaaggatgtgaaacgataacctcacaatctccttctataacaaaatctccggaatccgccggcacgataaagtgatcgcctttctgaacggggcatccatccagttctccgcgccctttaatgacgcttgcgagtaaataccggccgggtgcggggaatgatgctttcccgctcacatcccattgataaactgaaaagaaaggtgtttcggcgagtatcgtaataagagcatctccgatccgatgcttagtgctttttacattttcatcggtatggggaatgtctgttacgtcaattgctttctcaagatgaagctcgcgtttattcccgttcccatccgtccggtcatagtcgtaaagccggtaggtggcatcagagctttgctggatttcaaggacgagcgtaccttcacataaagcgtgcagtgtgccgctcgggacatagaaaaagtcgccgggcttaatggggatgcggcggagcaggtgatcccactcgtttcgttcaatgagccgaacgaaatcttcttttgtttgggcgcggtgccctaaaatgagctccgcgtcttttttgcagtccaacacgtaccagcattccgtttttccgagttctccgttttcatgccgatgtgcatatgcgtcatccggatgaacctgcacggataagtccatatttgcgtcaagaatttttgtgagcaggggaaaagcttcttctttcggatgtccgaacaggtcagggtgttcattccagagacggtgtaatgatgttccggaaaatggcccgttccgcacgatggatgtaccgtgcggatgagctgaaatcgcccagcactctcccgtccgctcagaaggaatctcatacccgaatgtatcgcgcagcttcgtcccgccccataatctttctttaaaaaccggttccaaaaataagagtttcgtcattttcccgcctcccggtttgccgtctctaatgcgcgctccgccaatacgagcgaaccggccgcgccggagtgaatccctaattgagggggaccgatgaagtgttcaatgtcgggcagatcaatatattgattcagccgctttttcacgtgctgacggatataagagaacagctgatgctgcttcatgacgcccccgccgagaatgatcttttccggcgaaagtatgagaatatactgcacaagcgcttcggcaatataatagccttcaagctcccacacttcctgctgatccgccagcagatatgcttttttcccccagcgtttctcaatggcgggacctgccgcgaggccttccaggcaatctgtatggtaagggcaattgcctttgtagccgtcgtccgggtgtcttctgacataaatgtggcccatttcaggatgagacagcccttgaacaaatctgccgttcatgatggcgcccgctccgatgccagtgccgaccgtcaaatagaggcagctgtccgcgtttttggccgcgccgaaagaagcttctccgagcgccgccgcattaacgtcggtggtgaagcctgcgggaatatgcagtgcgcttttgatcgtttgaagaatagggcagttccgccaggctgtcttcggcgtcgcggtgatgcacccgtatgtttgactgtcggggcggatgtcaatcggtccgaacgacccgatgccgatggcttctatcgggaaatctttaaagtaacggatgacttgtctgagtgtgtcatccggttctcccgtcggaaactccgccctgtccagaatggtgccgtctttttgtccggcggcacagacaaatttcgtgccgccggcttcaatacctccaagcatggctgtacctcctcatctgttaaaatccgttttgatcggaaacggctttgaaccagcggccgctttttttgacggtccgttcgcccccgttttccagattgacagatacaaagccgtagcggtttttataagcatttgtccaagaccagttgtccataaaagtccacaggtgatagccttttacatttgaaccttctccgatggcccgatgcacccatttgagatgttcccggataaattcaatcctgtaatcatcctgaatgatgccgttttcatcgcggaagcgttcctcgccttcaactcccatgccgttctcggaaataaaacattcgatatttccgtaatgttctctgagattggtgagaatgtcatagattcctttttcgtatatttcccacccgcggtgtgggttcattttccgtccgggcataacatacggatcgaagaaacgctcaggcaggaaaggggcgtgcggattcggaacatgttcttttgccttgacgcgtctcggctggtagtagttcacgcctaagaggtcaaccgtatgctcctgaatgaggcggagatcttctttctcgtaacgcggcagaaagccttccgccttgagaatctcgacaagctcctcaggaaattcgccctttacggcgggatctaaaaatgagcggttgaaaaaggcgtcggcaatccgggatgctttcagatcttcagggtgtgagcttctcggataagaaggcgtcagattcagaatgattccgatttgtccgtcctgtttcaattctctgtaggctttgacagcccttgcattcgacagcagggtatggaagccggcctgcaccgcttcttgaaaattaacgtgattcggatagtgaaagtcgtataagtagccgccttcaatcggcacaatcggctcgttgtgagtgaaccattttttcactttgtcaccgaatagcgaaaagcatgttttggcgtaatgttcaaacgcgtcaacggtgtcccggctgacccagccccccttacgctgaagggcgagcggcatgtcaaagtgaaacaaattgacaaacggctcaatgcgatgggcaagcatttcatcgatgacgtcctgataaaacgcgaccgctttctgattgacctcgccagttccgtccggaatcaatcttgaccaggaaatagacagccggaaggagttgtggccgatttctttcatcagccggatatcctccttgtattgatcataaaaacgtgacgtgtcgccggggccgacgccgttaaaaaaacggctcggctctttttcataccagtaatcccatatgttttggctttttccgtctttgtcggcggcgccttctgtttgggtggcggaggcggaagacccccaccagaatccttccggaaaacgatattgaatatttgattcagtcaattgatttctctcccttactgcgattttgattacatactcatgctgtcatcccgtgcttgctgctcggcctcggcttctttttcctttgccatgtttaatttgtccagcgctttaagaaacgggaaccagataataaacacaatacagaggttgaccagctgcataatgccgcccatgacggaattggtcgccataatcccgttaatgaaaagggggacggtccagggcacggtcacgccagtaggagggggcacgatccccgccgacatggccaggtaggtgacgagcgtgacaaccatcggtgcgatcacccacggaatgataatgatcgggttcatcacgatcggcaaaccgaaaataaccggctcattgacgttgaaaatgcccggcgcgagaccgagtttggatatctgtttcatctgtttgcttttcataaaaagcaagatggtgatcactatggccaatgtcattccggttccgcccattccgacggtgtaaatctccataaacggcttagaaataatatggggaatctcttttcccgctgtatacgcagccaaattttcgacctgtaatgtattccagatcgggtccatcacggaattgataatgatctgtccgtgaagtccgaaaaaccataaaatctgaataaagaaaacagcgattaatgtaggaatgatgccgcttccaagtccgacaagcggggcttgaaccgtatgataaatgacatcatgcagattggtgtgaaagatctgggtgacagccgcattgatcaagaggaagacggtaagcgtgataaaagccggaatcaatgcggcgaacgatttagcaacagccggaggaacaccggcaggcatcttaatcgttaagtttctctggacgattcttctgtagatttcacccgacaaaaaagcggttatcatgccgagaaacatcccttttgctccaagccggtcaaccggaatgacgcctgcgaccgctttgcccgtttccggctctaagacgaacggggtgagcagcagaaaagaaaccaatgcaatcgctccgccgaatacggcctccacttcgtagctttttgaaaggtaatagccgatcccgaagacgacaaaaatggacataatccccatcgtcgccgtcgaagcgccgccaaatccggattgaaagacagacagggcggagctgctcatgattttgtttaaaaacggcaggttcgtcagcacgacgaacaccgaaccgaaaatggtcagcggaaacgccagcataaaagcatcccgtaagacttgcaggtagcggttattgtttaatttgcccgcgatcggaacaaggaattggctgattttctcaaacacgtcttcacccccggctttttataaattctttgattgaaataagtcgagcatttctttgacgatctctttcattgagagcgctgacattaagtggtcttcagcatgcataaaaagcagggagacatccgtcttggcgccgccggcttctttttgaatcatctgaaaatggatgtcgtgcgcttttcccagttcttcttcagcctttgtcagaaaggtgtctgactcatctggccggccgtctttataagcgcgtatcgattgaataatacagctgcgggcattgccgctgtgaagaatcagctgaaaactgatctgttcatccgtgtacgtttccatgcttatcgcctcctttatttgttctctatcaaggaaacggcctgttcgtatgcttttttgccgtctcccatgccgtatgccatcatatcaatcacatcaacggtgatgtgaagcgggtccgcctctttctgaagctcgccttttaaaaaactcatctgcgggccgatcagtacgacgtctgcgtctttcatcgcttcttttgctttatcctgtccgactgcccaaatctcggcctcctcaccgatggagctggcgtaattctgcattttcgtcacaagaaggctggtggacatgcctgagctgcaggctaataaaattcttttcatgaggaatcccttctttcataaagttaaaacgttttcatgaatattataatcttttgaaattaaatgtctatacttttaaaatataaaagttttacttttcggatttttgacacaaaaaaaccttttaagattcaacttaaaaggtttttcatctcaagcgagccataacagccataaataaagtccgatcagggtgatgaataacgtcggaatggttaatatcagacctgttttgaaatacattccccaggaaattttcacgtttttccggctcagcacgtggagccataacaatgtcgccagcgacccgatcggcgtgattttcggcccgaggtcagaaccgataacattcgcgtaaatcaatgcttctctcagcagcccgtgagtgtccgttccgttgatggctatggcgtcaatcatcaccgtcggcaggttattcataacggaggagaggatcgcagcgataaaacccattccgagtgtgcccgcaaacaatccgtgatccgccgctttctgaataagctgagaaagaagatccgtcagtccggcattccgcaagccgtacacgacaacatacatgccgacagaaaaaaacacgatggcccacggggcgtccttgatgacttgtttcgcagggacggcggggcttcgctgcgccagaatgagaaaaatgaccgcgatggagccggcaacgaaggaaacgggtatcgacagcagttcgctgacgaaatatccgatcaataaaacggccagcacagcccacgataaccggaaaaggcgttcatccttaatcgcggatgccggatgtttcacaagaccggtgtcataccgtttcggaatgttttttctgaaatagagatacagcaccaaaatgcttgccgccagagaaaaaaggttgggcaccagcatgcgtgttgcatattcaatgtacccgatatgaaagtaatcagcggatacaatattgaccaaattgcttacaacgagcggaagcgaggtggtgtcggcgatgaatcccccggcgataataaacggaaaaaccagcttttcaggtaaattcaaagcccgcaccatcgccagtacgatcggcgtcaaaatgagcgccgctccgtcattggcaaacagggcggagacaacagcccctaagaccgacacatagagaaacatccgcagcccgctgcctttggccgccatggccatatgcagcgcggcccactcaaaaaaaccgatactgtcaagaattaatgaaatgataataatggcgataaaggcgagtgtcgcattccagacgatccccgtcacttccgcgatatcgtgcaggctgactgctccggcgatcaaagcgaggaccgctccgccgcaggcagaccagccgattgatatatgtttcggctgccatatgacaaacacaagtgtcagcacaaaaatcagcgctgataaaaccgcaactcccaagaatatatcccccttaccggcatgtaacagtgacttctttttgccgcaatgtctgtaaaacttcgtccttttcatctatctgctgcagaatcgagcaaaccagcgcgtattccggtccggacggatgaatggcatagtaccgccactggccctcgcgtctttcgcgcacaaggccggcgttctttaatttccgtaagtgctggctgatgccgggctgacttatatgaaaaatagccgtcagctcgcagacacaatattccttatcctccagaagcttcagcatcaaaagcctcgtcgggtcgcttagaagtttgaggcactggctgatcccttcggaacttaaagcattatgccgccgttccatgcgctcactccttttttacactattatataagcagacatttatataagtaaacggcaatataaaaaaagccggtcttgcactttttgcaaaaccggctcatgtttatttttggaacagttttttcgcttcatccattgctaatttatttcccagtgccgaataatcaagccaaggctgatcggcaattttatagacatggtttgctttcacggccttaagccctttccagacagcgcttttttgcaattctttataggcttgctgtgacttgtcgtctctgttaacgaccacgaaaatcgcatctgcgttgtaatcaggcagcacttcttgagaaatgacttcataagggcgggaggtattcatttctttaatgccgtcagccggtttcagcttcagatcgtcaaacagaatcggtcccatcgggcggcgtgtgctgaagacgcgaagctcttttgcgttcacgcggatcgccatgactttggcgtttttccctaattccttattcatcatggatctgacttgttttgtttcatcttcgtaatcttgaataaatgttttcgcttctttttcacggttgacgatttttccgatgtcttttaaatgatcacgccatgtgcctttatcaaggtcgaaaacgtgtgtgtttccgattttcttgtatttagacacatcttttcccgcaaattctttatcaagataaatgttgtctggattcagctcaagtaaagcttccatatccgggtctgaggcaggtccgagttttttcgtgtctttcagctgatttttcacatgagggagaaaatcttttaattctccgcccacgacggaaccggcaggtgtaacgccgagagccagcagatcatttgtcaggtgaatggacatcgaagcgattttatgatcgccggatttcttttttgactccggctgtgatgaatcggattggcaggcagccagtaagaaaatacacatgaaactgatgagcgcaattatttttttcatgggaatactccttgttttatgatttgattttcatgacgagatagagaaaatacggcgcgccgatggctgccgcaaccacgccggccggaatggcgttcggctgaaacaaagaccggccgatggtgtctgccgcgacaagaatgacaaggccgattaatccagcaatcggaataatatgctgatgcatggtgccgacgagccgtcttgccaagtgaggggcggcaaagccgataaagccgattccgccggccatcgcgacgctcgcgcaggacaagccgaccgctatggcgatcagcatgatcctttttctctgcacgtgtgcgccgagccccgccgctgcctggtcaccgagcattaaaatattcaaagaccgggcgttaagccatgcaagcggtgcgagaatgccgatccagggcaaaagcgaccacacgtgaatccaatctctgccccagacgtttcccaccagccagcgggaagcgaaggtataagtttcttcattcaggcgcagcgacataaacaatgtaacggcgctgaagcccgcggaaacggcgatcccgaccaacagcatgcggatcgttaaaaaaccgttcagcctgtcgtacgtaagcactacgatcagcagggcggcgagtgttccgcccgcaaacgtaaacagcgggatgaacatcgacgcctgcgcctccagggaatgaaagaatgtgatatacatcatcaaaccgaaggaagcgccggcatgcagtccgagaatgcccggatcggcaagcggatttcgggatacaccctgcaaaatagcgcctgacacgcctaagccgataccggccagcatcgtcaccagtatccgggggagccggtaatcgaataaaacggttgtgctttgaaacgtgccgtaaccgaacagcgtttttcccacggtgaggggagaaagccggaatgagcccgtgtgcagcccgatcagaataatgcaaacggcgatgaccagcagaacgagacctgccgccgccgctttttttgtttctttctgcactttcatttataagtctctcccttccttgcgggcaatataaagaaagaaagggacaccgacaagtgccaccatgatgcctatcgccaattctctcgggggactgaccgtgcgtgaggccaagtcggccaaaatcaaaagaatcgcgccgagcaacgcggacatcggaataatcagcctgtacgtaacgccgacgatcttgcgggcgatatgaggaatgaccagcccgacaaagccgatcgcgccggcagcggaaacagacacaccggcaagaacgacggcgatcattaatcccgcggcacgcgtcagagccgtgttcacccctaaattcgccgccacgtcatttcccattgagagaagggtgacggaccggcccatgaatgtcgcgagaatgatgaagaccgcaatcacgggaacaaggacttgtaaatgagcccacttgatccccgacaccccgccggcgtaccagaaggccaaatcctggcttaaatcgtaataaatcgctacaccggtactgagtgaatgtaaaagcgcggccacgaccgccccggcaagcgtcacctttaaaggtgtcatgctgccttttcccgccgcactgataaagaaaatcaagccggtgcttgccagtgctcccaaaaatgacatcatcatcagcagggcgtatgacaaatgagggaaaaaagcaaagctgagcgcaacaacaaacatggcgcccgcgtttacgcctaagacacccgaatcggcaagcggatttctcgtgacaccctgcatgagggcgccggctgcggcaaaagcggctcctgtaacggccgcgccgagcactctcggaagacgcaattcatgaatgatctgctggcccgttatgttcggattgtaatcagcaacagccgaccaaaccgtatgtaaagtaatgtctttcgcgccgaatgagacggcgaaaaaaatagaaacaagcagcccgatcaccgcgatcaggaagaaaaccccgttttttaagatgctgatcagacggcttgcggacgtgacagaatcgctcaaaaatcaattcacctacttttatgatcattgtccggcatttattgaatatgagaatcattttcatttgaaccatcatattataccgggccgattttcaaaacgcaatagagtgttcaacaatgatgcccttttttctttcatgtttatattgtaaaaaagaagtgaaaaacgtgaaagaggaaatcgctatattcagaaaggagggaggcaaatggcgggagaaggaaagcctttgccgattgaattttaccagagaccgtcagtggagcttgcccctttattgctcggctgtctccttgtgaaggagacggatgagggaacggcttcaggttatatcgtggaaacggaagcttatatgggagcggatgaccgggcggcgcacagtttcggcaaccggcgcacgaaacggacggaaattatgttccatgaggcgggccgcatttatacatacgtcatgcacactcatacattaatgaacgtcgtcgcctcggacatcggcattccgcaggccgtgttaatcagggcggcggagcctcatgaaggacagttcctgatggagagcaggagaccgggcagacccccgagagagtggacaaacggcccgggaaaactgacgaaggcgatgggcatttcaatgaacgactacggcggcatgatcacggaaccgccgctgtatattacggagggctttacgcctgaacatatatcaacaggcccgagaatcgggattgacaacagcggagaagcccgggattatccgtggcgctattgggtgacggggaaccggtatgtctcacgctgaccatgtttataaacgctgataacaggggaaagacaaggtaaaagaaaggggattcagacattgaaaaaatttttcaaaacgattatcaaatgggcgcccgtcatctatccgattatcagaaaaatcataaaagaacggaaggcatctaagcggaaccgcatgtccgcatcccgaacagccggctgatccggctgtttttttacggtcttggcatcggattgccgcattgacttgaaatcctccccagtatagaatttacatacatttaccccttcctcattctttttgcccatttttcacatctgcatctgatctgataggaggtttttctcatgcttcatgggcggcttcgtgaacttctgcgcttgcttttagctgctgaaacaccggttacaagctcagtcatcgctgcaaatgtaaaggtaacgacgcggacggtccgcaatgacataaaggaactgcaaaccattgtagaaaaacacggcgcatccattcaatctgtcagagggagcggctataagctgctgatccggaatgagcagccgtttaaaaactggcttcaggacaatttccagcagaacagcaccgtaccgatttttcccgatgaacggatagattacctgatgaaaagaatgcttctggccgacggctacctcaagctggatgacttggcggaagaactgttcatcagtaaatccacacttcaatctgatttaaaagaagtcaaaaaacggctccgcccctatgacatcattttggaaacaaggccgaactacggctttaagctgcgcggcgaagagctccgcctccgttattgtatggcggaatacttagtggacgaccgcgagcccgagcctgatctcctgagtgaaaaggccggtattctgccgaaagacgacattcatgtgatccgcacagccattatgaagcaggttcgaaaccataagatcccgctttctttcttcggcctgaacaatctcatcatccatatcgccattgcctgcaaacgaatccggacagaaaactatgtatctctcattccggaagatcttcatgatattaagctcgaaacagaatatcagtcagcggaagccatcgtaaaagagcttgaatctgcgctttcggtcacctttcccgaacaggaaaccgcctatatcgccattcacctgctcgggacaaagcgcatgacccagtcacaaatggaaggaaaagagcttacaaggctgatagacggggaaaccagccgtttgacggaggccatgattgaagccattgagcgggagctgaagctcggaatcacggacgacaatgagctgaaagcgggtcttgcgctccatatcaagccggcgattaaccgaaaccggtacggaatgaacctgagaaacccgatgctctccgccataaaggagaattatccgctcgcatttgaagcgggagtgattgcgggaatcgtgatcaaggagcaaaccggcattgatattcatgaaaatgagatcgggtatttggcgcttcatttcggagccgctattgaaaggagaaagacggaacggccgcctaaacgctgtctgattgtctgtgcgtccggcgccggcagcgcgcagcttttaagagaaaagctccgttcccggttcgcaaaacgtcttgaaatcgtcggaacggctgattactgcagccttgaccagctttcctttgagtcgattgattttgtggtcagcacagtgccgatcaaaaaagacctgcccgttcccgtattgaaggttcatacgctgctgggcggcggggattttacaaaaatcgacgccatgctggaagaaaatcgggaacaattgaactttctgaaaccggagctggtatttttgcagcaggatctggagacgaaggaggacgtcatccgttttctcggacagcaggttgcagaagccggcctcgcttctgattctctgaccgattctatttttgaaagggaagcgatttctcctacgagtttcggcaatcttacggcgattccgcacccgctcgttccgcagacagacacgacgttttgggcggtatgcacgctgaagaagccgattgactgggcggataagcgtgtccaatttgtctgcctgctctgcgtcgagaaagaaagcaaagccgacctccagcatatgtacaaatggctcggcggcatgttggatgatccggccgcggtaagccgtctcttaaaatgcacaacctatcaggaggttttacgagtattcagagacaaacgatcagagaaagaccgggatacaccttttttccgttagcagcggaaaaagcctgagtagttatgaaagcgatttcataatatgatgttactaacatcgagacatacaaaatatcaaactttcaggaggtcttttacatgaatatattactcgtttgtgcagcagggatgtcaacaagcttactcgtcaccaagatggaaaaaagcgcgcaggaacaaggaaaagaatataaaatctgggcggtgtcaggcgattcagtcaaccagcatattgataaagcggacgtattgctgcttgggcctcaagtccgttatttgcttccgcagctgaaaaaattgggtgaatcaaaaggagtgccggttgaagtcatcaataccgtccattacggcacttgcaacggagcggaggttctgaaatcagcggaacagctcggaaacgcatcgtagaaaggggcgggccgtgtgaataaggtgaaccagtttttagaagagaaagtcatgcccattgccggaaaaattgcctcccagcggcatctgcaagcactgcgtgacggaatcatcctcaccatgccgcttatcatcatcggttcattttttctgatcatcggcaacctgccgattccgggatatgcggatttcatggcgaagacgttcggaagcgcctggtctcaaaaactgcaatatccggttgatgcgacctttgaaatcatgggccttgtcgccgctttcggaatcgcctaccgcctggctgaaaaatacggggtggacgcattatcggccggtgcgatatctttggcggcgtttctcttggcaacgccgtacaaagttccgtttctgccttccggcgcaaaagaggaaatcatggtgggcggcggcatcccgctgtctctcatgggaagcaaagggctgtttgtcgcgatgatcatcgccatgctgtcgacggaaatttaccgcctgatcatccagcggaatttcgtcttcaaaatgccggacggcgtgcctccggcggtcagcaaatcatttgtcgctttaattcccggctttgccgtcatctttctgatctggggtgcgcgtttaattgtcgaagcgacgccgtttgaaagccttcataacattgtaagcgttgtactggggacgccgctctcgattcttgggggaagtctcggcggaagcctggtagccgaagcggttcaaatgcttttgtgggcgtgcggattacatggggcgaacattgtcggcggcgtcatggcgccgatctggttcggagcgatggatgccaaccgtgttgcgtttcaggcaggcgatgcgctgccgaatattttcacccagcagttctttgaaatctggatcaacatcggcggaagcggcgcgacactggcgctcgtggtcaccatgtttctccgttcgcgaagcaagcagatgaagcagcttgggaaactcgccatcgggccggctgtctttaatattaatgagccgattattttcggaatgccgatcgtcatgaacccgatgcttctcattccgttcatcatcacaccgcttgtcacactggtctttacctatatcggcatgagcacaggcctcgtcgccaaacctgccggcattgccgtcccatggacgatgccgccgattttctccggctatcttgccacgggcggaaaaatatcaggggctgtcatgcaggcgattaatatcatcacagcctttatcgtgtactatccgttcttcagaatgtgggattcgcaaaagctgaaagaagaaaacgaacttgaacaatcgcaggcgccagccgtacagggagacgaaaaagccgtgctgtagagaaagggagtgaaacacatgaatgaaaaaatggaacagaccatttttcagatcatcctgcatggcggcaacggcagaagcgcatcaatggaagccattgccgccgcaaagcagggggacagagccatggccgaggaaaagcttcaggaagccgcaagggaactgaccgaagcccatcattaccagacagaattgatccaaaatgaagccggcggagaaaaaacagacatgacgcttttaatggtgcatgcgcaggatcatttaatgaatgccatgaccgtgaaagacttggccgctgagttagtcgagatttacgaaaaagtgagtctgcaagggggagcaaaaatatgacaaaaagaattaaaattgtaacgatcggcggaggttcaagctatacaccggagcttgtggaaggcatcattaagcgctatgaggaactgcctgtcagagaattatggctcgtcgacattcccgaaggcgagaaaaaactcaatatcgtcggcacgcttgcaaaacgcatggtcgaaaaagcgggtgttccgatagagattcacctgacgcttgaccggagagaagccttgaaggatgcggatttcgtaacgactcaattccgcgtcggtctccttgaggcccgcgccaaagacgaacggattccgttaaaatacggcgtaatcggccaggagacaaacggtccgggcggtttattcaaagggctgcgcaccatcccggttattctggaaatcgcgaaagacatcgaagagctttgtccgaatgcgtggcttgtgaatttcacaaaccctgccggcatggttaccgaggccttgctccgctactcgaatctcacaaaagtcgtcggcctctgcaatgtgccgatcggcattaaaatgggcgtcgcaaaagcattggatgtggatgtcagccggatcgaagtgcaatttgccggactgaatcacatggtcttcgggttagatgttttcttagacggcgtcagcgtgaaggatcaagtcatcgaagcgatgggagacccggaaaacgccatgacgatgaaaaacatttccggagcggaatgggagcctgaattcctgaaggcgctcgatctgattccttgcggctaccaccgctattatttcaaaacgaaagaaatgctcgagcatgaaatagaagcttcacagacggagggcacacgcgccgaggtcgtgcagaaggttgagaaagaactgttcgaactgtacaaagatccgaatctcgccatcaaaccgccgcagctggaaaaacggggcggagcgtactacagtgacgcggcctgcaacctgatcagctccatctataacgacaaacatgatatccagcccgtcaatacgataaacaacggcgcgatcgccagcattccgaatgactcagcggtcgaagtgaactgcgtcatgacgaaagacggtccgaaaccgatcgccgtcggtgatctgccggtgtctgtccgcggactcgtccagcaaatcaaatcatttgagcgcgtcgccgctgaagcagccgtcacgggagattatcaaacggcgcttcttgcgatgacgatcaaccctcttgtcccgtcagactccgtggcaaaggccattctggatgaaatgcttgaggcccacaaagaacatctgccccatttctttaagtcgattgaagcataagagcagtaaaaaaacccggattcgcttccgggttttttgcttattttgattcgcttagtgaggcgactttcgccgtccagccgaacacgtcggcttccgcgcctttttgaatgcctgtaatggtatcatacaatttcttcgagatctctccggtttcaccgctgccgatgacaagactttcatcattccagatcagttcgccgaccggagaaatgaccgccgccgtaccggttccgaatgtttcttccaatcggccgtcacgatgcgcctggatgatttcatcgatcgaaatcttccgctcagacacagtcagtccccaatgtttgagaagggtgatgacggaatttctcgtaatcccttcaagaatgcttccgttcagctccggcgtcacgatttcgccgctgattttgaagaagatgttcatgctgccgacttcttcgatgtatttcttctcaatgccgtcaagccataaaacctgggaaaatcccttctcttccgcaacctgctgcgctttcaggcttgatgcgtagttgccggcggttttcgcgtttccggtgccgcctttgacggcgcgcacgaattcgttttccacggcgatttttaccggtttaatgccttctttgtaataagagccgaccggggaaaggatgataaacagcttgtacgtatgggatgccgctacaccgaggaaaggctcggtcgcaataataaacggacggatataaagggaagtgccttccgctttcggaatccagtcttggtcgatggctacgagctgtttcaggccttcaagaacaagctcttcatcaatgagcgggatgcaaaggcggtcatttgactggttcaggcgctccatatttttctccggtctgaacagaagcacttcctgatccttcgttacatacgctttaagcccttcaaaaacggtttggccgtaatgataaaccatggccgcaggatccattgagatggactgataagggataattctcggatcataccatccttgatcggcgtcgtaatccataacaaacatatggtcggtgaaaattctgccgaacgcaaggttatgggggtccggtttcggttttttggctgaagtcaattcaacacgaatgtcttgtttcataatgttctgtctccctattggtgttattgtcaaacttatttgaaaataatttatattctattgtataccttcaacaaatattcgcaatagttttcctcaaatttgtgaaaaaatcaaatcacataaaaagcaggggagagaatgccccctgcgtgttcgtttttacatattctgtaatcatcgtgctcagtgaaccgtcaccttgccggttttgtaaaactgctccattgctttatcgacgtacacccagcccttccaggcgatatggatggtgtctttcataaagtacggatcatattcgtgcccggataagtcggcaacctgaaagcccttcgctttaatttgcttagtgacttttttgtagtaatcagtccggccttttttcgggaagccggtgtagtcataccattttccgttgaccggaataactacgaacatcggttcagcgccggcatctttcagaatgtccagcatatcctcaaagtcgtgatattcgactgatttggcgtacgttcttcctttgttgattcctttcactctctttactttcttcttaatctttttataagaagcgtcatcgatatagaaaggattggacttggagctccgttctcctaattgagcggcggctgtttttaactctgaccacgatttccctttcaggttttcagagatcgtccgttcagggcccttggtttctcccattgaataataaagatcttttttctcaagcagagaataataagctttggcagccggcatgaccgctttcactttccatgattgtccgttgaccattcccttgtataattcagaaaggacggcatcatgctgaacaactttaaaacggagcatgcgcttcatcatgttctttttgaccgcgggatcaatctggttattaaatgctaaatccaatgcctgaagtgatgaaaaattcggcgcaaagtgctgttcatcagaaccttttttgataaaccattgcggagaaacaatgaataccagctttttgcccttcagctgctgataatgcgccgcaaagttcacggcgtgtatcaaggattggtccccgccttttccgacaagataaggcgtaaagccttggttgttcacttggaaatagttggacgggtgaaactcatccagtcttgaaagctcggaagaaccgaaaatcggcatatacttcgagtcttcgaacattttgttttgcagatagaggccctggaacatattcggatttaaggccgctgccgactcttcgacacgtttttcaggaatgaagcgcgtaagccatgaagccggaactgcgatagctccgacaaacaggacaaacgctaaaataattggtccaaagaaacgctttttcatttacttcaactcagtcagtttgtttacaatgttgtttggcgtattccactcgtcacggtcaaattcagtgatcggcactgtaatgccgaagcggttttcgatggcgacaagcagttctacagttccgaaagaatcaagcagtccttcttcaaagatttcaatatcaggattttctttcacagcgtcctcctgacaaacttcagctaatacgtctaatacttcctgtttaaattccatgtgttttcaatctcctttagtgatgaaatggttttcctgagaaaatataaaatccgaaacatacgaaatggaatgtgatgacgatggctaaaaaggccgtaaaacgattggcgggcagccacttgtatttcttattccatttctcaaaaaagttatacccggtcattaatacggcgtggtaaaggccgtatataatatattgcagggcgagtccgtgccagacgcccatcagcatgaacagcaggaaatacccgatgttcgagacggccatccggttctttatccattttttctttgtcatccagaatacaaagcgcataaatacgtagtctctgaaccagaaggataaggacatgtgccagcggttccagaagtctttaatgtttttgctgataaacggcttattaaagttttccggagatttgatacccatgatatagcttacaccgacggcaaacatcgtgtaacccgcaaaatcaaaaaacaggtacaagctgtatccgtacatgtacagcacattaccccacagtttactgtgggtgatatgaggcagattcataatgaaatacgtgttaatcgcatatccgataatgaatttgtacaagaaaccgataaaaattttatgaatgccggtatacagtaaatcagcgtattctccctttgtccatactttctgttcgtccttggcaaatctgcggtatctgtcgatcggaccggaagaaatggtcgggaaaaacataataaagtacaaaaggcggtgaagcggcattttttctttaatcagtccgtctctcgtttccatgatcagctggacgcctttaaatgtcaaataagaaattcctaagaaactgatcaggttatgaaccggatgatgaggcgccggcgggaagaaaaacggccataatttagataaaaacaggggtaaaatggacgcgatcacggccatactgaagacaaagccgctgttggctttcagtctgtaagcgagataacccctgattaaaagcacctgccacagcgtaaagatacatagtgcgatcacgccgtgcagatcatgcgcgaaaatcaaagccaatacgatgatggatataaacatgttgtatccttggaatctcttgccgttcagccctaaaataatcgtcggcaaaagaaggattccaagtaagataaagaagaaaaacgagctgtaaggcgtcatacaagaacctcttcgccaatgcgtttacggtcgatttttccgttcgcagtcatttgaatgtgatcctgataaatgaattttctcggaatcatgtaggccggaagcgaagcggccagttcttttttaatggcgcttgtcagctggaattctttttcaaaatcatgtttttcaggcacgatggcggcaattaaatattcgactggtccgttaggctgatacgggatgacaaccgccgtctgcacatattgagactgccttacatgtacttcgatttcctccagctccatgcggtagccgtgaagcttaatctggaaatcaaggcgtccttggcagaaaatctgaccatcctgaacataaccggcatcacccgtgtgatatgcccactggccgtcaattgagaaaaacgctttttccgtcagagacggttcaccgagatagcctttgctcacgctcggcccggcgatgatgatttcccctttttctccgtccggaagcttattcccgttttcatccatgatgaagatattcatatcgggttttgcaaaaccgacgggcagagattcattttcatcgataatctgctgcgtaatttcaacggaggtgacggcaaccgttgtttcagtcgggccgtatgtattgaatacgcgggccttcggaaaacggtttaacagttcctgtgccacggcagccggaagcgcttctccgcaaaacataaatacttctgcctcaggcaggagctcctgcgtaaagccggggtccatcagacacatttggacgaaagacggcgtcgatgtccagacgttcagtttggatttctccagctcttcaaatagtactttcggtttattgattttgtctttcgttacgcagtgcagcgtacctcccgtttgaagcgacgggaaaatgtccatgacagataaatcaaaagaaaacggagcttggtttaagaatgtcttacccccgcccacaggaaaatccctgcagatccagtcagtgaagctttgcaggttatcagccgatatctgcacgcccttcggatttcccgtgctgccggacgtgtaaataatgtaaaacgtatccagctcttttacccagttctcacggctgaggtctgcatctccgtcagctgcaagctcttcgggcgtaacggttttaatcagattgcttcccgtatcgactgcatcgcccgatacgctgataagcagctctgcgcctgagctttcaatgattttgacgatccgctccgccggaatggaaacatcgacagggatgtaagggcggcccgctttgacgcttcccaagaaagaaacaatcatattcggctccatatgtccgtaaaccaggacaggcgctttcgaaccgtcagctgtatgtttttgaatgccggacgcaacccgctccgacaaatcccataattccccgtaagtgagggaatgatctaaggaacgaaacgcttcggcctgcggcttggcgtctgcgtatgtttttatagcatcaagtagtttcatagttatcctccccgattagaaatcgttgtaaatataagtgccggtattcgctgtatgaaatccatacatccaaaagagcaatactaatatcagaaaataaaagcccgtatgaaacgtccatttgatcaatgtattttcataagcacgttttaatttttgcatcatattcaaaattccttccccgcgtattcaataattacaccagtatatgacgattagattaacaaaaagtttcaaaatatgtctaatatcctaagcttaaaatttccttaaaaatgaatgagaaacaaaaggatggaaaacacgcatgtataaattggcaaatgatcatactaaaaaggcgctgttcaggcgggatttttaacttatcgtaaatataaacgaggtaaaaaaattttggcggctttttcttaagcaggcttgtgccgaaccccaagggagaagggcgaaaagccgtttccggcaggatagctgataaagcgccgcatcttgtgaaatgaggaagaaattattatgatagataaggtagcagaaaacgtgaaaaccccaattcaacactactgttatcggctgactgtgaaagccttttaatagaaaggaagaggaaaatgaatcaaaacaatatggggggcagccaaaagacgcccgagaaagaaagcatgggccgcattttgtggcagctaacccgccctcatacattgacggcatcgtttgtgcccgtacttctcggcaccgtattggcgatgttttacgtaaaggttgatttcctgctgtttttggccatgctgttttcctgcctttggatccagatcgccacgaacttattcaatgaatattacgattttaaacgcggtttagatacggaggattccgtcggtatcggcggagcgatcgtccgccacggcatgaagccgaaaacaattctgcagctggcgctcggctcttatgcgattgctctcgtgctcggtgtttatatctgcatgagcagcagctggtggcttgcggctatcggccttgccggcatgctgatcggctatctgtatacgggcggcccgctgccgattgcgtatacaccgttcggggaactgttctccggcatttgcatgggctctgtatttgtccttatttcttttttcattcagacaggcagaattaatgaacagagcattttgatttccatcccgatcgccatcctggtcggagcgattaacctgtccaacaatattcgtgatattgaggaagataaaaaaggcggacgtaaaacgctggccattttgatggggcatagaggggccgttatgatactggcggcatcttttgccatcgcttacatctggatcgtcggtcttgtcatcatgggttacacaagcccgtggctgttcctggtctttttgagcgtgccgaaacccgttcaggccgtgaaaggctttgtgaaaaacgaaatgccgatgaacatgattattgcgatgaaatcaacggcgcaaaccaatacattcttcggattcctgctttcaatcggactcctgatcagttatttccgctgatcaaatgaaagggcaaatgctataaccggcatttgcttttttttatgacataatcttcacgatattgtaaagaacctgaccgcggactgacccgtctcatatatggacagcaaagcaaggagatgaaaaaaatggacttgtcaacagcccatatggatgatttaaaaacggtcatggaagattggaaaaatgaattattagtttataaattcgctttagatgagctggatacgaagttttctatcatcagccaggaatataatctgattcacgggcataacccgatcgagcatacaaaatcacgcgtgaaaagttttgaaagcatcgtcaataaactgatgcgcaaaggctgcgatgtgacgacgcaggaaatgaaagagcatattcatgatatcgcgggtgtcaggattatctgttcctttatttccgatatttataatgtcgctgaggttctgaagcagcataaggacctgaagatcgtaaaggtgaaggattatatcaaacatccgaagccgaacggctaccgcagcctgcatttgattattgaaattcccgtttatttgacgaatcgtgtggaatatgtgaaggcggaaattcaaatccgcaccatcgccatggatttttgggcgagccttgaacacaaaatttattacaaattaaataacgaagtcccaaagcatctgaccgacgagctgaaggaagcggcggacatcgcccattatttagacgaaaagatgcttgggattaagaaagaagtcgattaaacgattgacccgtcacaaccagccggaccgctattatacgcagtccggctggttgtttatccgtttatgcgcagctgtacaaattttcgcctgcccacctgaatcgtcatgccgtcttctgcggtaatgacggtatgaagggcatccgttttctccccgttcactttgattccgccgttttgaatcatacggcgtgcttcgctttttgaagaaaagagtccaagcgtgacaagcagctcaataaggggcacggtcttttctccgtcccatatgacggttttcatatcttcaggcaggctgttttgctggaagacacgtttgaaatgccgctctgccgcatccgccgctttcgtgccgtggtacattctgacgattgtacccgctaagatcattttggcatctctcggatgaagctttcctgattccaaatccttctccatctgttttttctccgcaggctctaagtctgtcgctaaatggatatatgttttcatcaggctgtccggcaatgacatcgttttgccgtacatgtcgttcggatgctcgtcaatgccgatatagttgttttttgatttagacattttttcaacgccgtcaagaccttccaaaagcggcatgaggatgacgacctgcttttcttttttgtagcgttcttggaaatggcggcccatcagcacgttaaaatgctggtccgtaccgccgagttcgatatcgctttcgagaacgacagaatcgtaaccctgcatcagcgggtaaaagaattcgtgaagtgagatcggtttttgcatggcgatgcgctcctcaaagtcgtcgcgctccatcaggcgggcgacagtaattttccccgctaattcaatcacatcttccagattcaatgtcttcagccattttgagttgcagtgaagttcaactttgtcttgatccagcaccttgccaaactgttcaaaataggttttggcattgtgttggacttcttcatcagtcagctgttttctggcttgcgacttccccgtcggatcaccgatttttccggtaaagtccccgataacaagctgtatgatatggccgttttcttgaaattggcgcagtttgtttaacacgacggtatggcccaagtggacgtcgggtgcggacggatcaaggccgagtttaatgttcagcggcttgccggatgccactgatttggcgattttatttctcaattcttcaggcggtatgacgtccgcggcgccggtcatgtacaaatccagctgcctttgcacttctttttcctgatcattcgttaaagtgattgattccatcttttacatcctcctttttttagccaaacaaaaaagccgcatcccaaaaagggacgtggctgtatgcacgcggtaccaccctgattgaagacgaaacgacgtcttccgctcattcgaataacggtttcccgttctttgctactgaagttcacaaagaaagctcagggaggtaattcacgtttgtctttgtgccggcttgcaccatccgccggctctctgaaacagggagacaatccgttactgattcccgtcatagctgctatgttatgaaattgtcagcgattttttgcagcagggcggacagcgttttttgttcctgtttatccagacaggccgtcagttcaatttccccctgatgaaagtcggggtacagatcttcaataacctttctgccctcatcggtaatactgacgaatacaagcctgcggtctcttttgttcgtttgtctgctgcataagcccttcttttccaaagtgttcaggacattgctcgccgtcgccgaggtaattccggatagagcggctatccttcttgtatcaagcgtttcccattcacaaaggtcatacaggatggaaaacgccgtccatgataatttgtgtgccgacagcacctctttctccatttttacacggagctgctgggcggaccgatagagtgcagctgcaatataggccgcctctttgtttcggccggatagatcggaaaaaggcctgttcggcttcttattgtctgatccggcatcgttgcgaatcgtcaatggcgtcatgctccttattattgtcagaatcattagctatgaaatgaattttaacagagaatgcgaaagatatcaaatcgcaaacagcacattcccgcagaaaaaatgtgtaagattgaggtttactttttaaaaaaagggaaagacatttgtacaacaaaaagggagatgaatatcagtgggaaagaatgaaacaatgcatatcgtatcatgtgccgatgataattatgctcgtcatttgggtgggatgttcgcttctttattgatgaatatggataaaacaaggaatgccaaattatatgtgatcgacggcggaattactgccgaaaacaaggacaagcttgaacagactgcgatgtcattcgggacgccgcttgaatttttagaagtagacgctgatcaatacaagcatgcagtcgaaagcagccatattacaaaagcggcttattaccgcatttctatccctgatttaattaaggatgagtccgtaaagcggatgatttacatcgattgcgatgcaattgtgatggaagatatttcggttttatgggacttggatatttccccggcaatagttgcggcggtagaagatgccggacagcatgaaagactgaaaaaaatgaatatcagcgacactgccaagtattttaattccggtattatgattatagatttcgaaccttggagaaaacagaatatttccaaaaaagtgattgattttatcaatgataacagctcggaggattttctcgtgtttcatgatcaggacgcgcttaacgcgatcttatatgatcaatggcatgaactgcatccgcgctggaacgcgcagacgcatattatcatgaatgagaaaacgcctcctgaactgatcgaccgtatacgttacagagaaacacgtgccgaaccggccatcgtccatttctgcggcggggacaagccttggaatacaggcacctcgcacccgtatcgtgatcattatttccgatatatgtcctttacgaaatggaacacgattgaccgcccggccatgaaccaataggcaggtgtgatgaaaacgcttgtgaagccgttgaccggctcacaagcgttttttttattatttcacccgaatcgcacgcacgcgtttttgcaggctggtcttttcggcagacggcttcaatcggctgactgccgtttgcgccgctgattttgcttttttcgtcttggttttttccgccgtttttactttgtcccttgcctgctgccggttgagtttatcttttatccagccaagccgtttttccagaacggttttttcttttcccggctggatttcgctgactgctttttgggcttttgcggtgttggcctcagaagtctttttttccgcctgcttgacgctggcctcagcagttctcaaaaggcttgagttgacagcgttcagccgcttttgcagcccttttttctctgaaccggccggtaatttgcggatggcgctttgtgcggcattgacggcggtttttttcttttgtttttcggcagtccggactttgtctcttgcgtccgtcacatttcttgccgtctgaactttattgatccgcgcctcgagagcggtttttccttttgacttggacagtttgctgactgccgtttttgcttcatcgatatctgcctgctttttcgtcttttccgcttttattacggcccgttcggcaaagctcttttgttttgtgtgatattgcgccagtccgtagccgaatcggctgtcacgtccgggagcgcccagatctttgacgttctgctgcatctgctgccggagctgtgtatttgtttcctccggatatttctgcctgagcagcgcgaacatgccggtgacgtgcggcgcggcttgagatgtgccgtcagctgtggcgtacatttgattcagatacgtgctcgtaatattagtgccgggtgcggcaaactcaatttgttttccggtcgtggaaaaagctgcgagcccgtttttttcagttgacgctgagactgccgttacgctgctgtaggcgcccggataattgacgggttttttattgccgtcgtttcctgcggcggcaacgatcacgattccttttttgtaagctttgtcaacggcgtcgtgaagacttttgctgtctgcgtttgtcccgaggctcatattgatgatgtccattttattggcgatcgaccagtcgatcgctttaagaaggcttttgagatctcccgctccttttctgtctaatgctttaaccgcatataaccggacatccggcgcgatgccgtcgatgccgtatccgtcatgtttggccgcaatgattccggcgacatgcgtcccgtgtccgttgtcatctttgtatgagggagtatagctgactgcggaatagcctccggcaatggagagatcatcatgagggtaaatgccgctgtcaatgacagccactttcaccttttttcccgtcaagccttctttccacgcctgcttaacctgagtcggttcgatatcccattgcggcagcacgtaactgctgctttgggcagctgataacgggcggatatcagaaccgcctgctgcctgaaaggatacattctcttctacatataagatgtcagggtcctgtttcaggtctttcactgtttgcgaatcggctgacacggcgactgccgggagatgctgataggtctgttccacatccgctccgctgtctatggcggattccttgccgttttgatttttgtacaccacgataacgtcccggtcatgcgtctcggcgtgcgcgggcgccgcggcggagaacaggctgatgcacaaggccgcggccattatcggtttcagggtgtgatacattgcgattccccctttttctttatatatcggcagtgcggaattctttttttcctgaggggtaaggaaaatttctgtatgcaaatgtaagcgtttccaaaatatgatggagaaaatgctttaagacatctgcgcaatgaactcaaaaagggggtttttgataaatgagtacgttcaatcgggtcatggaagaaaaaatcatgcctgtcgccggaaaagtcgccggccaaaggcacttaagagctttgcgggacggcattattttgactatgccgcttatcatcatcggatcggtttttctgattctgacgagtcttccgattcccggttatgccgattttatggctggtcttttcggtgaaaattgggttgaaaagctcgggtatcccgtgaatgcgtcctttgacattatggcgcttgtcgccgcctttgggattgcttaccggcttgcggaaagctatgaggtggatgccctgtcgtcgggagccattgcccttgccgcctttttattggcgacgccgtatcagattccgtttatccctgacggctcgtcaacagagattatggtgggaggcggcataccgatttcgctgctcggaagcaaaggtctgtttgtcgcgatgatcattgcaatgctgtctacggaagtgtaccggtttattatacaaagaaatatcgtcattaagatgcctgacggagtgccgcctgcggtcagcaaatcgttcgttgcgctcatccccggtttcattattattacgcttgtatggctggcccgtctgtttattgaaataactccttttaaaagtctccacaatgtcgtaggcgatctgctgggcaccccgctgtctattttgggcgggagtctcggcggaagtcttatcgccgaattcgtgcaaatgctgctttggtcgtgcggcatacacggcgcgtccataatcggcggcgtcatgtcgccgatctggtacggggcgatggacgccaaccgtttggcttttcaggcgggagaagcgctgccgagcatttttacgacacagttctttcaaatatggattaatgtcggcggaagcggagcgacgcttgcccttgtgctgaccatgcttgtgcgctccagaagcaaacagatgaaacagctcggccgtctcggcatcgggcccgcgatttttaacattaacgaaccgattattttcgggatgccgctcgtcatgaatccgctgttaatcgtgccttttattgttgcgccgctcttgaccattacggcgacgtacatcgggatgagcacggggatggtggcaaaaccggcgggaatcgccgtgccgtggacgatgccgccgctgatttccggttatttggcgacgggcggaaaaatctccggttcggtcatgcagctgatcaatctcctgattacatttatcatttattatccgtttttccgaatttgggatcttcaaaaatggagagaggaacgggcggcggaacaaaacgtcacagaagaaacataaaaaaaaacgggcgctttcgcccgtttttttaacgctggaaaaattcgatccattcgccgtcaggtccttcaatgtaaaagtagcggtacccgttcggaagtgtcgtgatttcttcatcaatgaatacggcgccctgacgcttcgcatgcgtgaactccgctgcgatatcttcagtcaataaagcgacatggtgcacttttccttctgcgggaagctcgctgctgtagccctggatcagctcaatttctgtctccggcccttcttgaaagccgagaaaggcaagttcaataatgccgttcgtatgagtgatacgatcctttaactgcataccgagaacgtcttggtaaaaggcgatggatgtttcaatatctttgaccataatgcctgtatggtcgattcttttggctgtcatggttttccccctgttttgaatttttcgggacaatgcggtgttgatcatgttttatggtacgataagagaaagcaaaacgaaagaggaatgcacaatgaagctacttacagtgaaagatacatttgccggaaagctgaaaaaaggattccccctgattgaaaaagacgctctgtccggaagctcggctcatttaacagagggcgatctttttgatgtgacatccgagaagggtgagtttatcggaaaaggctattacggtttgcagaataaaggagtcggctgggtgctgtcccgcgcgagagatgaacggatcgacggacgtttctttctggacaagctgaaaaaagcggctgaagcaagagcccatctgtttaacgcgcccgatacgacggcgttccggcttttcaacggtgagggcgacggcatcggcggcgtcacgattgacttttatgacggttatctgctgattcaatggtacagtaaaggcatttacgcttataaggacagcatgattgaggcgattgacggactggagctttcttataaagcgatctatgaaaagaaacgattcgatactgccgggcaatacgtggaagacgacgattttgtcaaaggcgaaagaggagattttccggtcattgttcaagaaaacggcatacggtacgcggcggatttaaacgatggggcgatgacgggcattttcttagaccagcgtcatgtacgcaaagcgattcgggacaagtatgcaaacggcagacgggtgctgaatacgttctcttatacgggggcattttccgttgcggcggcgcttggcggagctgagaaaacgacaagcgtcgatgtcgccaaccgcagtctcgcaaaaacgattgaacagttcagcgccaacggaattgattatgaggcgcatgacattaaggtcatggatgttttcaaatacttcggctatgcggagaaaaaagggctggcgtttgacctcatcatccttgatccgccttctttcgcccgcacaaaaaaacggacgttcagcgcggcgaaagattataaaaacctgctgaaggaaacgatcgccatcaccgcaaaaaacggcatcatcgtcgcttcgacaaacagcagcgccttcaatatgaagaaatttaaaggttttatagagaccgcctttaaagaaacaaatgagcgttacgacattttggaagaatacacgcttccggaagatttcaaaacgattccggcgtttaaagaagggaactatttgaaggttgttttcttgcggaaaaaataggatgatcatttatagcgtggaaagagggggaaaagaaaaccctcttccatcgctttaatacgggataaataatcttcatatcttactgtttaaagaaaaaacccgctattatttagtatctcatctgtgccaagtaaagtggcctcactaatccctccgcccaattgtatcctcgataatgattttaatgggcaccaccctttttttgagtatctatataaattgtaatggcatcactcatgagcttcgccaacccttcaccataccggtcgatgttcttagtgaagcgttcatcttcaatatagagttgacctaatccgtaaaaggcatcaaaagaatattcaccaaaattttcattgagaaaatcaaaccactctttgatagctgtttgtacgtctggggactcgggagattggttaataaggagtgcaaatttattgaacattgcagtccacttatcagataaatctttttgctcaccatcagtcatgtttttcaatctaatatttaccttatcgacaggttgatcaccccaccgtttgcgggcttcttgctcataaagattatcattaaagttaattccctcaaaccgctctttgttcgtcatgcaaatctctcccatcatatgtttgattgatttatcgatggtttcaatcatcttattgactctattccgtttctcaatcaacattttcttttgtaaaatgaatgcttcccttcggttaaatgaaggattagtaatgatttctttaatctcttttaaggagaaatcgagctccttgaaaaatagtatctgctgcagctgttcaagattctcttcagaataaagccgataaccggaatcggtcgtttcctgaggagtcaataatccaatttgatcgtaatgatggagagtgcgtatgcttactccaatcaggtcagctacttcttttactttcatacccattacgtttgccgcctccttaatggctactctaaagtattacgcaacgtaagagtcaatagttggttaaaaattttttgtatataaagggagaacatatgaggatttcattgctgaaattaaagaaaaaaaagccgggcgtgaagctccggcttttttctattcaataatgtgctgcacccggccgattcgcccgtcttcaaggcggaccttaatgccgcgcgggtggaagcttgagttcgtcaaaatatccttcacgattcctcttgtcagctttcctgaacgctgatcggctttcaggacgatatcgacttcaagtccttttctgatgctgcttcgctgctggccgttcatatgacacatccgttcttcagtcttttcacttcatgtcttatcatatcgtgttttcgtctttttatgaaggacagacaaatcaattcttcatggcaactaaaaaaagaccgctctgtaaggagcagtcttttatgacataaacgaaagcaaaatcggggccgcgcacagtgtcataatcgcggcgagaatcatggacacgcttgagatcgttcctgatacggagctgagctcaaatgctttagatgttcccgctccgtgcgcgctagttccgagcagcacgccccgggcaatttcgttatcaatgcggaaatagcggatgaccatcggcccgatgatcgttcccaataaagccgttaaaatgacgaaaaccgctgtaacggccggcatcccgccgatcatttctgaaacgttcatggcaatcggcgtcgtcacggatcgcggcacgagactgtcgactaagctgctgccgagattgaaccattttgcgataaaggctgttgacagaatggcgatacatgaaccgaccgctacgttcaaaataatttccacggcgtatttctttaaaatcgggaaatatttataaagcgggatggcgaacgccactgttgccggctgaagcatatcggtcagcagtccgccgccgagattgtatgtctgatacgggacattgacaagaagcagcagtacgaccaaaacagcgggcgtaatcagaagcggcgacgtatacacccgcggaaaacgaatgtagagttttttcgcgcccaaatatactaagacagttaagaataaacttatgattccgatgaacacgtttgttttttctcctttctttttgctatcagctgtgtaagcgtacctgttgaaaccatcacgacaaatgtgctgatgacgacgacaagtaaaatgcttacgccgaatttagacataatatctccgtattcaatcactccgacggcagacgggatgaaaaacagcagcagctcaccgaggagccatgctgcgccaagctcaatccattcaagtttgataatcttgaaatgcaataatgtgaaaagaatcacaatcccgattatactgccgggaatatttatatgaagagccgccgtgatccaattgatcagacgcgcaaatataaacagcagagcgatttgaataacggtaagcagcaattttttcataatgatgcctcccttatatttatattgtacagaaggttttgctataggtaaaatacatataaagaataatgtgtattccttttgtctatagaaaggatgaaatgtaatggatatccggcacttaacgtatttcttggaagtggcccgtttgaaaagctttacgaaggcttcacagtctctgtatgtttcacagccgacaatctcaaaaatgattaaaaacctggagacggagctcggcattaaactgttttaccgcaatggccggcaagttgaactgactgacgccggacagagcatgtatgtgcaggcgcaggaaatcacaaagtcattccaaaacctgacgtcagagctgaacgatattatggaagtgaagaaagggcacgtccgcatcggtcttccgccgatgatcgggtccggctttttcccgagagtgctcggtgacttccgcgtcacataccccgatgtgacgtttcagcttgttgaggacggctctattaaagtgcagcaaggggtggaggacggctcgcttgatatcggggtcgtcgtgcttcccgcgaatgaagagatttttcataccttcacaatcgtcaaggaaacccttatgcttgtcgtccatccgtcacatcggctcgctgacgagaaagaatgcagtcttcatgaattgaaagaagagccgttcatatttttcagggaggattttgtccttcataatcgaattatgacggaatgcgtgaaagccggattcaggccgcatgtcatttatgaaacatcacagtgggactttatcagcgaaatggtatccgccaatctcggtatcggcctgctgccggaaagaatctgtcgcggtcttgatcctgacaaagtcagaaccattccgctcgttcatccggtcattccgtggcatttagccatcatttggcggaaggaccgctatatgtcctttgccgccagagcctggctggagcatacgaaatcgtatttatggaatccgaaaaagagaaaaaaggatgattaagcatggacgcacaaaccgcagctcaacacttgagtaaagtgcgggatcaaaacccgctcgttcacagtatcaccaataatgtcgtcacgaacttcaccgctaacggactgctcgcgctcggcgcatcgcccgttatggcttatgcaattgaggaggccgccgacatggcgaaaatcgccggagcgctcgtcctgaacataggcaccctcagctcggcatcggttgaagctatgatcgcagccggaaaatcggccaatgaaaacggtgttccggtcatttttgatccggtaggcgccggcgccacgccgtttcggacggcatcagcccgcaagatcatacaggaggtccgcttgtccgttattcgcggaaatgccgcggaaattgccaatattgccggcgcccctgattggaagataaaaggcgtggatgcgggggaagccggaggagatgtggttcagctcgctaagacggctgcaagcgggctgaagacggtcattgcgattaccggaaaaaccgacgtcatctccgacggcaccgacacatacgccgtacaaaacggtgataaactgctgacgaaggtgacgggggcgggatgcctgctgacgtctgtaatcggagccttctgcgcagcggggcaggacgttctgcaagcggccgtttcagccgtttctgtatacggaagcgccgctcagcttgccgctttggacacctcccataaggggccgggcagcttccagattgagcttttaaacaagctggcaagcatctcagaacaagaagcggctgagcttgccgcaattgaaagggtgatagaaaaatgacgcgtatttctcgggaaatgatgaagaatatgttatcggtttattttattatgggatcaaacaatacaagcgcagacccggtttccgtggtgaaaaaagcaattgagggcggcgctacgctttttcaatttcgggaaaaggggagcggttctttaacaggggatgaacgtgtcctgttcgcgaagcgggtgcaggatgtctgcaggcaggccgggattcctttcatcattaatgatgatgccgaattggccttgcgccttgaggcggacggagtgcatatcggacaggatgacgcagacgccgaagaaacgagagcggcaatcggcgatatgattctcggtgtgtcagcacataacgtctccgaggtgaagcgggcggaagaagccggagccgattacgtcggaatgggcccggtctatccgaccgaaacaaaaaaagatgctgaagccgtgcagggagttacattgattgaagaggtacggcgtcagggcatcaccattccgattgtaggaatcggcggcattacggctgacaacgcggcgcccgtcattgaagcgggtgcagacggcgtcagcatgatcagtgccatcagccaagccgaagatccaaaagcggcggcgcggaagttttcagaggaaattcggcgctccaaagcagggctgtcccgatagggcggccctttttctgtgtgcgcaaaaaggcgtgacggactgggagaatagaagccgtatgtcaagaacagagcaatcaagcttgcaatatcgaccgaagcgtttgacggctctatcgcttctctcaaagtgacgcctgaaccaatcagcgcaggctcaaaagccctctataaaacagtgaatagcgcgaagtgagagaccatttcgaggtcacggaaaaacttaatgcggaattcagcgaatttgaagttttgatgtcgaaatacaaaacgtgcgatcaatgtatacgtcttgtgatacattaagtacagatcaaatcagagagataagcacgaagctgacggccctttctgaaaccatgtcgaagattgccgatgtgctttaaaaggagttaagacacagcatgagcgatgaacataacaaggaaaaacagatccacagacgggatgtcctgaagtggggcgccgtcgcgggcgcagccgtcgctgtcggagcgagcggcctcggaggactcgcgccgctcttcaaaccggcggccaccgcttcaaagaagaatgatgaaaaacgtgatcgtgatcaaatcgttcctttttacggaaagcaccaagcaggaatcacaacggcgcatcagacgtatgtgtattttgcggcgcttgatgtcatgtcaagcgacaaagccgatgtcatctcccttttcaaacaatggacaagcttgacgcagctgctgacttcaggcgccgtcccgtcaggcgaacagaaaaataaatatatgcctccgcaggataccggggagtcgcaggatctggcaccggcgaatttgaccgttaccttcggcttcggccccgggtttttcgagaaagacgggaaggaccgcttcggactgaaagataaaaaaccgaagcacctcgccgatattccgccgatgcctaacgacaagctcgataagaaacaaggcggcggtgatatcgtcatacaggtctgcgcggataatgaacaaacggcgtttcacgcggtgcgcaacctgatgaaacaggcatcgggtgtgtgtgaagtccgctttctcaataaaggtttcttaagcggcggaaaaaacggagaaacaccgcgcaacctcttcggattcaaagacggcaccggcaaccaaagcacgaaggatgaaaacctgatgaattcgatcgtttgggttcaatcaggagagccggactggatgacgggcggcacgtacatggcgtttaggaaaattaagatgtttttagatatatgggaccgttcatccttgaaggaacaagaggacacgttcgggcgggtgaaaagctcgggcgcgcctttcggacaaaaaaaggaaaccgatcccgtgaagctgaatcaaattcccgccgactcgcatgtcagcgtggcaaaatcaaccggcagacagattctgcgccgggcattttcctatacggacggaattgatccgaagacgggctatgttgacgcaggcctgttgtttatctgctttcaaaaagacccggaccgccaatttgtcccgatgctgaaggctttggcggcaaaggatgcgctgaatgaatacacacaaacgatcggctcttccttattcgcctgtcccggcggctgtaaaaaaggagaatatatcgcccaaaggctgctggaatcgtgacaccttccatatggagggtgttttttttaaaaaaaacacttgtaactataaaagttacaacttaaaatgataaggaaaggagacttacaatgacactgcagattaaagtatattctgattatgtatgtccgttttgctatgtcggcaaagcggcgtttgaagaagcaatcaaggacaaggacgtacaggtggaatggatgccgtttgaattgcgtccgagcccctcgccgaaacttgatccggtgaatgatcccgccaagcggcagatgtggaaaaactccattgagccgatggcgcagtcgttaggcgttgaaatcacgttcccccgcgtgtcaccgcatccatacacggatttggcatttgaaggctttcatttcgcaaaggaacacgggaaaggaagcgaataccatacacgcgtttttcaggcgttctttcaggaagaacaaaatatcggtgacgttggcgtgctgacaaagcttgcggaagaagccggacttgacggcgctgccttcaaagaggcgcttgagacaagagcgtacaaggacgtacagcgggaagcgctccgccatgcttatgaggaagccggcattacggcagtgccgacgtttatcatcggcgatgagagaatccctggcgcggcgggaaaggaaacctttgaacaaatcattgagcgggaactgaataaacgttaacccgaaaaaagccctctcgatcagcgagagggctttgccatatagtgtttgacaaatgtttgtctgtccgcttcatatgccgcggcgtcaaaggagtcgccgcaaaaatgaaggcaccaagggtctttctggcaggcgacgccgacttgatagccgtgtttttgaaattcgagcgactgtgatgtgtcgtaaaaatgaaagccgcgaaacaaatcctcccgccactccacgtcatattgagccgccattaacaagccgtcaatggcgtcagcgggcgtaaacaggccgtcttcatcaccgtgctcaaaatccagcgggtgataagcattcccccggtattcaatcacttttcccatccgctgtccgctttcccaccaaatgccgttcggcggcagggttttgcagccggcgacaccgagaaggccgagctcctgatgagattgaaagatatgaagcatgtcatgaaggaaatgctgatgaatgataaaagtatcctgatgcagataaattttatatttggaggggtgtttcagcgctttgttgtaggacgaggccatgcttgctgaatcgtatatcggcatgatatcaacggagtatgaaggggggacggtaagctgcatgatatggctcttgcaccgggagtacagcgactcatcattcacacagacgacaaacagaaatgaatgtgaatccattacatgctcctctcggcctcaatcacatattgataggccgatgcttctgtcataaagtcatgccttatgccaagctgtacgcatacttcgtgcaatgatgcgatggctttgtggtaagaagggtgatcaacgcggatcgcctcaatgcgtttgacctcatagctggcggctttaaataatgaaagagtctcttcccgggtaaaaaaacgcaggtgggtctgatccattaatccggcgtcactgtaagtccatttgccggctaaaagctccaacacgactgagatgtggccgacattcggtatgcatgcaagcacagtgccgtctttttttacataaggacgaagctttttcagcactgtccacgggtcgacaagatgctcaagaacgtctccgaacagcatgcagtcgaattgctctgattcgtacggaagaatggcggattcaatgtcgccgcaaagcacgtggctcaatttgctttccgccttttttgcggcttcgggatacgcttcaatgccgtaaaccgttattccgcggtcttcgatcgccgctcctaaattgcccgtgccgcagccgacatcaagcactgtccgccagttttcgtctattttgttcaataaataaggattcaggccttcgtagtagttctgttgtttttcatcataatagggattcgtatccatctgtgtatcacctcataaatgggcataatacacaagatatgcagcggggggatctcatatcaccatgtttggctgttcaattgcggaatgcggacgggaatggttgtccggtatacggtttgttctctgattcccctcttattgcgggtgttcctttgaaaactcgggtgcgggcggactgtggcaggtcatatagtaaaaggatccgcctgtaatcttaccgctggcggatggtgtttttcattggtgtttttttcttcaccgctttttcagtatttaagaagcgcctcacatcgtcaatgtgcaaacccatgattctagcctcttgaattaacaattgccaatcttgatctatatctttcattacatgagttttcataagaacctccaattgaaaaattgatttgcccagctacagcagccaatgtataacaaatatcacacatagttggccggtaatcccaaattgaagatgaattcacctacctattccctaagaaaatgactgaaataaccaaaatccttcaagaattcttacatataataataaacaaataaatactgactggatagtatgcaaataaaaataaaccatatgacctattaacatttaccctcaaaacgtcgattagcatattctttttgcataaaaaataccgcaaaagaatgattcggtgtaagataaagtgaatgatcaaacagctggggtaaaaaatgaaaaaaaacaaatttcaaattaagagagaagaaacatttgaaagttttattgacgcaggccttcatctcctgattgaaagagcttacgattcagtctcaatcgatgacatcagtaaagcggcgggtttcagcaaaggggcgttttacgttcattttgaaagcaaggaagattttctgaagcatttgttagagaggcgtcagattaaaaaaaggatcatcactggctatctcgacgaattagaaaagcaaacagagcggccgttgacgctttgtgaagccgcggccagcgcggccagcctgttgatgcggtttgtaaacagcaagcctgcctggaatgttgtgtcttttgccgttcatatgcctacttacaaagtcgtcagtgaatatgaagcttatatccgcctgtataagttatggatagaagaaagcaccatgtacataaattggctcaaatcgagaaatttaatagaagaccatatagataccgagcataccgctaacatgatgtgcgcgctcatcgacggggtgattaagcaatccaatgtgctgggaaggccggttactttccgcagcatgtttgacgcgctctatgtttttgtcagcaccagaaaatcagggtaacgttcttcttgatttgacaaaaggtttagaaaagtctttcagaaagcgaggaactgccatgcgctacagagaaattatgatgtatatcattatggggatattcacgaccatcgtgaatatcgtcagtttttacattctgacgtcggcatttgagatggattacaaggcggcgactgtcgccgcttggattctgtccgttctatttgcttatgttacgaataaacggtatgtctttcagcaaaagaccgcggggatgcggagtctgatgaaagaattaacggcctttttcagcgtgcgggtactgtctctcgccatcgatctcgccatgatgattcttctggtcagtcaatttcatatgaacgaaacattggcgaaaatcgccgataacgtcattattgtagtcgtcaactatgcggccagcaagtggattgtcttcagaaaagcgaaagaagagggcgtgtcataaccgtttctttccgcgtcccggggggaaagtgtaatggtggaaggggatgcgtttgaagcgcaaaataaagaaagcgtttgctgatgtattcggggaatccgagacctgcgctttttctttgcgcccggcagagtgaatctcatcggagagctaacgggggccgctatgaggagaagacagagagaaaagctgacttttacacggcggatatcggcgccggagcgagagaactaaagggggatgacgatggcaattgagcggcacgtggaacgtttaatccagtacggattgcaaaaagagctgatttcatttcttgatattgaatatacaagaaaccgtttatatgaaactttgcatattacccatccggaggcttcagaacagaaagaaaatgaatcggcggcatcattgccggacatattggccccgatttatgaatgggcggcagaaacgggccggattgcagccgatacagacacctatcgcgacctgctgagcgcgaagatcatgggctgctttgccccgcagccgtccgagattgtgcgtcgttttgaagaaacaaaggcggtgcacgggccggagcaggcgacaaaggcgttttaccgattttcagaggatgtgtattatatccgttcggacagaatacagcggaatgtcggatggacggctgagacggcttacggaaagctggacatcacgatcaacctttcaaaaccggaaaaagatccgaaagcaattgccgctgccaaagagcagcctcaatccgattatccgggatgtgttctttgtaaagaaaatgtcgggtacgaggggagaccggatcacccggcgcgtcaaaaccttcgtgtcattccggtcattctcggcgatgagcagtggtttctgcaattttctccgtatgtgtattaccgggagcattgcatcgttttgaaagaccggcacgaaccgatgaagatcagcaaaaaaacgtttgaccggctgctgtcgttcgtcagccagtatcctcattattttctcggttccaatgctgatctgccgatcgtcggcggcagtattttaagccacgaccattttcaggggggccattatgaattcccgatggcgctggcggagacagaaagctggtacaggctgcctgactatccgaaaacggtgctgggaattgtgaagtggccgatgtcggtcatccgcctgcagagtgagtgcgcgtctgagctttccggcgcggcggatgccatcctgcgggcatggcgcggttattccgatgaggcggctgatctcctcgcctgttcaggagaaacaccgcacaatacaattacgccgattgcccggcggagaaacggtttattcgaattagatctcgtcctcagaaataaccgcacctctgatgagcatccgctgggaatttttcatccccatcaggaagttcatcacctgaaaaaagaaaatatcggactgattgaggtaatggggcttgcgattctgccgggccgccttgaacaagaaatgaaatacacggctgaagcgctgtgctcaccggacccggaggcggtcttaacggcagacccttctgcggcaaagcataaagattgggcgctcagtgtgctgcataagcggaaggtaacgaaagaaaacgcggaacagattctgaaagaggaaatcggccatgcctttgcgcggatactggagcatgccggcgtctttaaacagacagaagaaggcagagcggctttccggcggtttatccgccatttgggcgctctaccggaaaaaagccccatcccataagggacgaggcttttttttatcctctgcttctggcgatcaggctgaataagaataccacgatcgcagctccgatgattgccggaatgatggcaaagccggcaaggtgaggcccccatgtgccgagcagtccgtgcccgatccatgcgccgatcagaccggcgatcattgacccgatgattcccccgggcatactgccttttacaaataaacttccgatccagccgataataatagcgacaatcagagatacgataaaacccataaatatcacttcctattttttattatttatgcctatatgtttccttcgttttgtccatattaaacatatgaatgcgttttttataatgaacatatcaaggcgcgttccggtcttttttttcacaatgcgttgcgttaaaatggaaaccgtgtgaaaaggtgtgagcaaaggaaaaaatatttcttttgtagaatgtttaacaaaatgaaactttttgttgaccagcgatttttattatggtaaacctttatttggtattattcgttctcgctatcttttttctctatatatgctaaatgatctaaaactttttatgtttgatttacgcaagtggaaaaagctcatgcattttttgacgattttgtgacattaggtcgaaaaaaagatgaactttagaaaaaaataaagctaataagggcagattttgatagcataacaaggtagatagagaaaagattttgagaaagtacatttcagattcactacatcaataggaaggatggtgatcttcttgttcagagcatttaaaccgttacttttattagcgatgttggctgttgttttcgtactgggcggatgcagcgacatttccgttttagatccgaaaggacctgtagcagaccagcagaaagatctgattctcttgtcaatcggatttatgctgttcattgtcggcgtcgtattcgtactatttacaatcattttagtgaaataccgcgaccgcaaaggcaaagacagcggaaattacaagcccgagatgcacggcaacacgttcttagaagtagtctggacagtgatcccaattttaattgttattgcactttctgtgcctaccgtacagacgatatattcgttagaaaaagcgcctgaagcgacaaaggataaagagcctcttgttgtttatgctacttcggtagactggaaatgggtattcagctaccctgagcaggatattgagacggttaactacctgaacattcctgtagaccgtccggttttatttaaaatttcttcagcagattcaatggcatcgctatggattcctcagcttgggggacaaaaatacgcgatggcgggaatgctgatggatcaatacttacaggctgacaaagtgggaacatatgaaggccgcaacgcgaacttcaccggcgaacactttgccgaccagaaattcaacgtaaaagctgttacgcaaaaagactttaacagctgggtgaaaaaagcccaaagcgattctccaaagctgacgaaagagaagtatgacgaactgatgcttccggagaatgtcggaaaattaacgttctcttctacacacttaaaatacgttgaccacggccaagatgccgaatatgcgatggaggcgcgcaaacgccttggctacaaagccgtatcaccgcactctaaaacagacccgtgggaagatgtaaagaaaaacgaatttaaagtatccgacgataaacaagattgaaattgaacaagaaaggaggaagcccgaatgaaattgagatgggatgaattttttgtaacaggtgacccattaattctgggcgcacaagtttccattgcgctttccactatcgctatcatcgttgtactcacatacttcaaaaagtggaaatggctctggtctgaatggctgacgtctgtagaccataagaaacttggaatcatgtacattatctctgctgttatcatgctgttccgcggcggggtcgacggcttgatgatgcgcgcccagttagcgcttcctaataacagttttttagactcaaaccactataatgagatctttacgactcacggtacgatcatgattatcttcatggcgatgccgtttttaatcggtctgatcaacgttgtcgtacctttgcagatcggtgcgcgcgacgtagcattcccttacttgaacaacctgagtttctggacgttcttcgtaggtgcgatgcttttcaatatttctttcgttatcggaggttctccgaacgcaggatggacgagttacatgccgctggcaagcaacgacatgagtcccgggcctggtgagaacttctacctgctcggtcttcagattgccggtatcggtacgctgatgacgggtatcaactttatggtgacgatcctgaaaatgcgtacaaaaggcatgacgctgatgcgtatgccgatgttcacatggacgacgctgattacaatggttattatcgtattcgccttccctgttttgacagtggcattggcgctgttatcatttgaccgtttgttcggcgctcactttttcacgctggaagccggcggtatgccgatgctttgggctaacttgttctggatttggggacaccctgaagtatatatcgttatcttaccggcattcggtattttctctgaaattatttcagcgtttgcaagaaagcagttattcggttacaaagcgatggtcggctcaattatcgccatttccgtcctgagtttccttgtatggactcaccacttcttcacaatggggaacagtgcgtccgttaactctttcttctcgattacaacgatggcgatttcggttccgaccggggttaaaatctttaactggctctttacgatgtataaaggccggatcagttttacaacaccgatgctgtgggcgcttgcgttcatcccgaacttcgttgtcggcggggtaacaggggttatgcttgcgatggctgcagcggattatcaataccataatacgtacttcctcgtatctcacttccactatgtgctgatcgcgggtacggtatttgcatgtttcgcaggatttattttctggtatccgaaaatgttcggccacaagctgaacgaaagaatcggaaaatggttcttctggatctttatgatcggatttaatgtatgtttcttccctcaatacttcttggggctgcaaggtatgcctcgccgtatttacacttacggaccgaatgacggatggactgcattgaactttatttcaactgtcggagccttcatgatgggtgtcggattcttaatcctttgctacaacatctactacagcttccgctactctactcgcgagatcagcggagattcatggggcgtgggacgtacgcttgagtgggcgacttcatctgcgattccgccgcattacaactttgcggtgcttccagaagtgaaatctcaagatgcgtacctgcaattgaaagaagacaaaacggatattcatccggaaagcaagttcaagaaaatccatatgccgcacaactccggaagaccgcttattatgtcagtggcgttcggtattgctggcttcggacttgtatttgaatggttctggatgggcattgtcggcttgatcggcattctgctttgcatggtgcttcgttcatttgaatatgacaatggctactatatacctgttgaagaaataaaagagacggaaagaaagatttccgaataaaggaggcgtgatttatggaacatgcagaacacggcaattctaacgcgcctatggaatatcaatctgaaaccggcagactcaatattctcgggttttggatctttttaggggcagagattgtgttgttctcaacactatttgcaaccttcttcgttcttcaaagaagaacagcaggaggagtcttaccggctgaattatttgaagtgaagcttgtcatgatcatgacattcctgcttctgatcagcagtttcacctgcgggatcgctgttcatgaaatgcgtcgcggaagtttaaaaggcgtcgtcatttggacgatcattacgcttcttctcggtgcgggcttcgtcggatgtgagcttaacgagttcatccactatgtacatgaaggagcatctctcggtacaagtgctttctggtctggattcttcgtccttctgggaacgcacggaacgcacgtaacgatcggtatcttctggattgccggcatcttactgcaattgaagaaacgcggattaacgccgcagacgtcttcaaaaatctttatctcaagtttatactggcacttcttagacgttgtttggatcttcatctttacaggcgtctatctcatcggattggggggactataatatggcaaacaaatctgctgaacacagccactttccgtggaagcatatcgtaggttttgcgttgtctattattctgaccctgctggccctttgggttgcggtatatacggatttaagctcatcagcaaaactgtggatcattttcggattcgcatttatccaagccggtcttcagcttctcatgttcatgcacatgacagaaagcgaaaacggcgggattcaagtcggaaacacgctcttcggatttttcggagcgattgttatcatccttggttccatctggatctttgcggcgcactaccatcacggtgaccatatggatggaaaccctcctggcggtgcgaagcaacattccgaacatcaggaataaaaagaaaccctcttcgttcaggcgaagagggttttttgtgcctttattggcttcttctccggcgcaggcgcggaaggccgtaaatgataaaggcggcgatatgggcaacgatgacgttgacggcaaacaggatgatcatgagtgtgtggccgagaggggacaggctgctggttgcgtaaaagtagaagaaaacccacatgagaataattggcggtatggccgaaagagcgacttttttgttatccagccagataaagaggggtgttgcgcttgcgaccagtaaataagcaaaaaacatgtccatcttacatgtctcctttcattttatgggagcgtttccaaaatgaaatacagagaataaaatgtgtctgttttgtggtcgttttttgaacattttgttacaattattataccatgttttccaatttttgataccgctttatcgagaaatgtattgcaactattgcctcatttttggataggtacaagaaaccggaaaggtcaaataccctgtcacatttccggacaagggaatggcgcaggctgtgaacctttgctatgttcaaagaaaacatgcacagcgagggtggttttgaagtggacataacaaaagacgatgtcacagcgccggacgtcattgcgcttttgcaggagcatctgaagagcatgaccatgcattctcccccggaaagtatacacgcgctcaatgcggaccggctgcgtcagcctgacgttacgttttggagtgcgagggaaaacggcgtcctgctcggctgcggcgccttaatggagctaaacagccggcacggtgagatcaaatcaatgaaaacggctccgcatcatgtcagaaaaggcgcagccaaccggatcctccgccatatgcttgaagaagcaaggcggcggggctatcagcggatcagcttagaaaccggttctatggaggcttttctccccgccagacgcctgtatgaaaaagcagggtttcaatattgtgatccgtttgcacattataaagaggacccgaacagcttgtttatgacgttaaacatagactgaaaccccttttctgacgagaaggggttttttatcggaaaagtttcatcatgaccgaaacatttccttttctgacacgtcatatgtcgtgtagtccccaaaccgtaaaaaataaaaaggaagcaacctcatcatgttttcttgaacggtgttcatgtataataaacaatagtgacttccgatgaaaatgtaaggcgggatagaatgagtcgatataagaaacagcaaaatccctattatcagggggatttgatttttatatttggtgtgtttttaataattagtgttgcggcgatttatgcggccggacagttcgggcagtatggaggcagtgcctggatgaaacagattgtcttctatgttataggtgcgggattcatcggattattgctgtactttgatttagagcagcttgagaaactgagtctgtatgtattgattgccggcgtgctgtcgctgctccttttgcgtgtggcgccggaatccatcgcgccgatcaaaaacggagcgaagagctggtttcaaatcggcaactttaccctccagccctctgagtttacgaaaataggaattatgatgatggtcgcgtccattatatcgaaggcgggcccgaaagatcaaagatcacttcgggaagatgtcaatctgcttttgaaaattgcggcatggacggttattccaattgggatgatcgttttgcaggatgccggaacgggtgcgatctgtctgtttatcgttatggtgatggtgtttatgtcaggtgtaaactggaagctgatcaccatcatcggcggttcggccgcgcttgtgcttggcctattcttagtgcttgtaattgaatttccccatgtggcgaattcgatcggtattgcggattatcaaattaaccggattacatcgtggatgtctgactccagtgcggcaacgactcaggccgagagcgataaaagctggcaggtggatcaggccgttatggcgatcggatcgggcggcattaccggaaacggcgttcataatctgaaagtgtacgtacctgagggacagaccgactttatctttgcgattttgggtgaaagttttggatttttaggctgcgccattgcggttgtcatgtttttctttttaatttacaggcttgtggtgctgattgaccgcttgcatgcgtttaaccgatttggtgcgtttttttgcgtaggatttactgcacttatcgtgattcacaccttccagaacatcgggatgaatatcggcattatgccggttaccggtattccgctgctgtttgtcagctatggggggagctcggtgctttctacattaatcagcttcgggatcgtatataacgcaagtgtgcagctgacgaaatataaaagctacttgttcaattcttaatgtgagacggctcgtttttcgggctgtctttttttgtttagagcatttcgcttttggcatgatactctttcggatatgatatatagagaaggaggctttatatatgaacaataccatcgaaaccatacttaatcatcggtcgatccgatcatttactgacgagcttctgacagcagaagagatagatacattagtgaaaagcgcccaggcggcgtcaacgtccagttacgtgcaggcttactccatcatcggcgtaaccgataaggagaaaaagcggaagctggcggcactggccggaaaccagccttacgtcgaaaataacgggcacttgtttgtgttttgcgctgatttgtaccgccataaaaaacttgctgaggaaaaaggagaaaacattaccgagcttcttgagaatacggaaatgtttatggtcagcatcattgatgccgcacttgccgcacaaaacgtaagtgttgccgcggaatcaatgggactcggcatttgttatatcggaggcattcgaaatgaacttgatcaggtgacagaagtgcttggtacacctgaccatgtgctgccgctgttcggcttggtagtcggtcatcccgctcatccgtccggtcaaaagccgcgcctgccgaaacaagccgtatatcatgaaaacacgtacgatacgaatgaagaaaacttccgcagttatatgaaggaatatgatgaaaccatttccgattattatgataaacggacaaacggcaagcgggttgaaacgtggtctgatcaaatcctgcagttcatgaaacaaaaaccgagaacctatttaaatcaatatgtaaaagataaaggttttcaaaagaattaagaaaaaacctctcctgaccgggagaggtttttttatgtttcacgtgtaacatatttcgacaaaatggaacaaggtatataaatgtttatcatcagggatgctgataagcatacagaaagaaaaaacggcttagcagtggtacgatgttgatgaggtgacagtgatgatttcattaagtatattggatcaatctcctgtatcagaagggtgttctgcggaaagtgcactgcggaatacagtaagattggcgcaggaggcggaaaagctcggatataagaggttttgggtgtcagagcatcatttttcagagcggttggcgggctcaagccctgaagtgctgatcagccatattgcggcgaaaacgaatgacattcgggtaggatcaggcggtgtgatgcttccgcattacagcgcatataaagtggcggagaatttccgcgtgctcgaagggttgacgccgggcagaatcgatctcggattagggagagcgccgggcggaatgccgatcgcatcatgggcgctgaatgacggcgggaagcgtaatgctgatcaatatccgcagcagcttcgtgagctggcgatgtatttgcatgatgcagctgatgacaatcaccgttttccgaatctgaccgcatcaccccttattaagacggcgccggaagtctggcttctcggttcttcgggagaaagcgcgtttctgagcgcagaaatgggagcaggctatatgtttgcccattttattaatggagaaggcggagaaagcacgacagcacaatataagcgcagatttaaaccttctgcattaggtaaagaaccaaaaacggccgtggcggtgtttgtgctgtgcgcggatacggaggagaaagcggaggaactcgcggctgtcatggattatacgctgcttgcgggtgaacaggggattccgcttcacggcgtaccgtcttacgaaaccgtccgcggcaatacgtatacaccgtatgaacaaagacgaattgccgataatcggaatcggatgatcatcggaacgaagcagcaagtgaaagaacagattctggctctcagtaaagcatacggaacagaagaagtgatggctgtaaccattactcatcattttgaagataaacttcagtcataccgtctgcttcgagaagcttttgccgattaatcagaaagaaaccctgctgatgctccagcagggttgttcggttattcaatgataaaaggtttttcagtcagcacctggcttgatttccctttgttcgcggcataggccagcatataatattctcctgccggcagtgcggtgtcaccattgactttgccgttccagtcgaaatattgatagcctttatcctgctttttgtagatgccggcttggccgacaaagtcaagattactgtcatatacaaggaaggcaagctcttcggctccagccggaagataggtttcaatttggtaggttccctgcgttgtgccgtcctgtacgtcgattgacgttacgcgcggatagtccggctcttttacaatcagcagcgtcggcacttttgcgactgtttttccgccttcacgcactgtgacggttccctcataggtgcctgcctttacttttttggcattgacctttactttcgcattgacctttccggtttgatgagcggggatcacgacccggtctgtgcccgaaacggtaatgcccgtgccgttgaaagagtactcgagctgatatgattttctgatggacgattggttttcaatcgtaaaggtttcttttttcgtttcattgcctttgtctttcataaacgttccgtaagaataacttcccggggcgacaagggagtctgctttgatcgccttcatgattctgatgcttccggcgccttgcgcattatgcgggtatacgtcaccgtccgcgtccgttaaggtttccgccgtgttcataagagcggcttttatttgttccgggctccatttcggtttggcctgcttgatgacggcagctgcgccggctacatgcggggaagccatgctcgttccctgcttcgatccgtagccgtacgggtcggccggatcatgggtcggaatggtgctgacgatgtttacgccgggagcggagacgtcaggtttaatcatccacgtgtccataaccggaccgcgtgacgaaaagtctgccatttgttcagtgagcgatttagccacggataaatggaatgtcgcttttgtgccgcccgcttttaattggctgacgagtttttcgccgtcttctgatgaaagcttaaccgtcggcacggacatgcccggtacgttggcttcaatttctcccggggcattgttatacacaaccataccgatcgcgcccgcttttttggcgttgtctgctttatccacaaaggcgatgctgccccgtttgacgaccgcgacttttcctttcagatctttgccttcaaaatccttttgctcgccgatacccgcctctatgagctctgtttcttttttattcagtgcttttatgtcatcttctttgttgtaccccattactttcgctgaggaataggaaccgaaggagacggcgtactcgttcagcggcagctgtgtcgctccgacggagatagcttctctggacgctcccggagagccgacggtccaattgttcggcccgctgtttccgtttgatgtaacggccgtgacgccttctgacatcgcccagtcaagcgccgtgcttgtcgcccagtctgggttattcacagaattgccgagagaaaggttcatgacatccgctccgtcctgtacggcgcgttcaataccggcgatgacgttctccgttgttccgcttccgcccggaccgagcacacggtaggcaaggagtgtagcatccggcgctacgcctttaatcgttccgtttgccgctaccgtgcccgcgacatgggttccgtggtcagtcgacgcgcctctcggatcaccggacggcgtttcttcaggatcgtaatcgttatccacaaaatcgtatcctttatattgtccgaaatttttctttaagtcagggtgtttatattcgacaccggtgtcaataatggcaaccttgacgcctttccccgtatagccgagcttccacgcgtcatttgcccctatataaggcgcgctgtcatccatctgcggagacacggcatccttagatagggtgatgtctttatctttcagttgatcggtatgataggtgacgttcggataaaccgctttgacatcctgatcactcagcagtttcggaatttcatttgccgggagtttcatggagaagccggaaaacacttgctcatattccctgttgatttttccgtgtttaatggttttgagcgctttctttttcacttttgagcgttcgcttttcagcttgctttttgtctgtgctttgccgagttcctttgcttccgccagtgacttttccttcagctcgacgatgactgtcgtttgtttgccggtggtcatatcaatgtcaccaaatacctcagccttctcaagatcaggagtttgcggttttgaagccggcgcagcctgtgaacttgtggataaggtaaaggataagacaaaagccggaagcagataacggatgattccttttttcaatcgtgtttccccctttttctttatctaaattagaaatctagtatatatttcttgaaaattcaaaataatccttgtgacatatgactcatttatggaaattggtctgtgaataaggagggagttatacacagaatcctgtgcataactgaataaaattgtgtatatatattgttgggaacgagtgttcccatacaaaatatagatcgagtttgtggatatgtggatataccctgtgtttaagctgtgcttaaccaagggataaggtgtgtataactttttttatcggcttttccatttttcaggtcatttccatcagctttcaacaaaacttctgaaaactagtttgttttttcactcatattgtgacaaacaattcgcccggccgcgtctatcatagagtcatagggttgctagacccgctagtttttagcggagaaggatcggccgccttttccgttaaagcggagagaaaaacaggcctgcgaacaagctgtctgtcaaaaagaagcggagggatgatttgcaatgaaacgtttgctagtatctttacgggtgtggatggtctttctgatgaactggatggcgccgggtaacggaagatatccattagccgccgtgtacggaaaccaagcggcttatcataagaaagcgaagcggacggctggtgctttttcgtttgtgagccgagtccgatcggcggatttgaccgatgaaacgaaatcggcccgcggcaggctggataaaaaccgatggatgcctgtccgcaaagaattgccgaaacgggagcgcgcgggtccggcacctttacatcatatgaaaaagagggtacaatcccactaaacatatgaacgggagcgaacctcttgagaatagacaaagtattaaataacaatgcggcgttaataaaagaagacggacgggaaaagatcgtaatgggtcccggaatcgcttttcaaaagagaaaaaatgatgtgattcaaaaacataaaattgaaaaaatatttgtcgtgcacgacgaaaatgaaaagttcaaacaagtgttagaaacgcttcccgaagagcatatagaggcggctgaagatatcatcagccatgcggagggagagcttgcggcgcctttgaacgatcacatccacattgcgctggcggaccatttatcctttgcgatcgaaaggattcaaaacggccttcaggtgcacaaccgattgcttcatgaaattaaggcgctttataaaaaagaatatgaaatcggccgctgggcggttgaacacgtgaaacaaaccctcggtatatcattgcctgatgatgaggcggggtatatcgcgcttcatatccacactgccaaggcggatgccaaaagcatgtattcggcgatgaagcatacaaccatgatcaaagaaatgatcgaaaagatcgaatcctttttcgaacagaaggtggatgaagacagtatttcctatcagcgcctcgtcacgcacttacggtatgcggtcagccggttggactcaaatgaagcactccattccatggacgaggagatgctttatttcatccaaaaaaagtatccgtttgcttatcggtgtgcgcttgaactggcggcgtttttaaaaaatgaatatgatttggaactgccggaatccgaggccggctatattacgctgcatgtccagcgtctgcaaaaaaacccggaataacgcgtctgtttcgagaaacagactttttttttgaaaacatattgacgaaagcgctatcatgaaataaaatgaaagcgcattaaaaaactgaatcggcgggattgtgactggtaatgcaggcaagacctaaaatttgcgtacatgaaaaagggatcatgctgacctttttcgttggcgaattttaggtcttttttgattttagaaagggggatacatcatgaattatcaagaaacggcaaaacagcttatcaaacatatcggagggaaatcaaatatcatcagcgcgacacattgcgccacacggctcaggctcgtcattcaagatgaacagaagatcagccaggccgatattgaagagacagaaggagtaaaaggggctttcagcagctcggggcaatatcagattatattcggtaccggccttgtgaataaagtgtatgacgctttttcaaaagaagccgatttggggcgggaggatcgtgagacacatcaggacgcggcgaaaaaaaagctgaatccggccgcaagatttgcgaaaacactgtctaacatattcgttcccatcattccggctatcgtggcaagcggacttttaatggggctgctcggtatgatgaaggctttccactgggtgtctgaacaatcatcgctgtttaagcttttagacatgttttcaagcgcggcgtttatcttcctgcccgtattcatcgggttcagtgcggcgaaggaatttggcggcaatgcctatctcggtgccgtgctcggggggattatgatccatccggcgcttttgaatccgtgggggcttgcggatgcatcgcctgattttatgcaactcttcggcttcgacattgcgctgctcggctatcaagggacggtcatccccgtactgttagccgtttacattatgagcaaagtggaaaagggcacgagaaaaatggtgcctcacgcattcgacttattggtcaccccgtttgtcacggtgattgtcacaggatttatcacctttatcgcaatcggtccgcttggcagggcgatcggatcgggcattaccgtctcgctgacatatgtgtatgatcacgcgggcattgttgccggacttcttttcggcggtctttatccgcttattgtgctcaccggtgtgcatcacagctttcatgcgattgaggccggcctcatcgctgatttgggcagaaactatatccttcctatctggtcgatggcgaatgtcgctcagggcgcggcgggactggctgtatttttcctgacgaaaaaagcgaaaatgaaagaaatcgctctgcctgccgcattttccgcttttctcggcgtaaccgaaccagttattttcggtgtgaacctaaggtaccggaagccgtttatcgcgggaatgatcggcggagcgctgggaggggcctatgtcgtggtgaccggcgtcgccgccaatgcttacggtctgaccggaattccgatgattgccatcacggctccgctcggtttaggaaatcttataaactatctgatcggaatgggcatcgcctctgtctcggcgtttattgccgcttacattatgggagctaaagaaaaggaggccgtcaaatgaggacaccggatcaagagctgcgcctgcaggctgaggaagcgaaaaagaagcggcaagaaacagccgcgtcagatccataccgccagaactatcatgttatgccgccggtcgggcttttaaatgatccgaacggcgtcatccaatggaacggcgtatatcacttgttttttcaatggcagccatttcatacggggcacggcgcgaaattttgggcgcatgtgacgacgaaagatttcgttgagtggaaagaggaagaaatcgcgcttgcgccgggtgagtggtatgacaaaaacggctgttattccggaagcgccatcgaaaaagacgggcggctctgcctgatgtacacaggcaatgtccgtgacggagaaggaaatcgggaaacgtatcaatgcctcgccgtatccgaagacgggatcgtatttgaaaaaaaaggaatcgtcgtgcgtctcccaaaaggctataccgctcatttccgtgatccgaaggtttggaagaaagacggagcgtattacatggtgctcggcgcgcagacagaaaagctcaccggaagcgctgtattgttcacatcagagaacctgacggattggacgtttctcggttcgattgcgggggcggactcgggcggtctcgggtcattcggctatatgtgggaatgtcccgacctgttttctcttgacggaaccgacgtgctgctcgtatgtccgcaggggcttgaagccgacgggataaaatatcataacagccaccaggcgggctatttcctcggcaggctgcatacagagccgccagaatttaagcacggtgaatttacggagcttgacagaggatttgatttttatgcggcgcagacgctggaagatgataagggacggaggattctgttcgcgtggatgggcgttccggatcagcatgaggacaagcatccgacacatgcgtatcactggattcactgcttaacgatgccgagacagctgtcactgtccaacggcagaatcatacagcgcccgctcccggaaatgaaatcgcgccgcacggatgaacaaaagcgccgtcttcaattgaattgctcgtctgtaagcctcccggtgaaagatgcgtcccgggctgaagtgctgctggaagacattacttgcgaatccggttttgaaatctcaattcggggcgcggcccggtttatatttcatcaggaagaggggctggctgtgctggagcgcaccgctttcagcggagaagaaaaagaaaagagaagctgcgccatcagcgagctgcattccgtccagctctttctggatgcatcctccattgaattgtttttgaatgatggagaagaggtattcagcgccagatattttcctttcccgggaaatgatgacgtaaccgtcacttcggttgggaaaacggaaataaatgcctcaatttggacacttttgtagaaaatcgttcttttttcttatgtgaaacctatgccatctgtgctattcttcaaacgaaagcctatgattccaggaataaaaggagttgttttctcagttttgaaaaatcagaagatgacgccgaaatgtttacttgtcaaagctgcagagcaagtggaagataaacgggaagaatataaagaagtattgcttcagctgaatcgcatgctcaagagggctgagccgcacaatgaatggagtgatcggctgaggcatacatatgaacagatgaaggaatatgcgctgtttgtgcaatcgattgagatgtttttgcggtcatccgcgaaaaaaatgaaataatccccctcgatcatgagggggatatttattttattttccgctaagacgcatcgccgaatgtttagtcggtccgatgtattggttcagcgggaaggattctttgattgccgcagtgataaattcttttgccgcatagatggcttccttcacttcagcgcctttggccagttctgccgtcacggcggcggagaatgtgcatccggctccgtgcgtgtaaggtgtatcaatcatttcgctttctaatacttccgcggtttctccgtcatacagcacgtcgatcgctttttcatgtttcaatttgccgccgcctgtaatcaatacatatttcgcgccgagttcgtgaattttcttggccgcttctttcatgtcttccaccgtttttaattcatccataccgctcagctggcttgcttcaaacaggtttggcgtgatgacggttgccagcggcgccaattgggtgcgaagcgcttcggcatgctccggatacagcacttcgttcgctcctttgcagaccatgacaggatcaataacgacattcttcagctgtttttctttaatcgttttcgccgcaagctcgatgatctccacggtagggagcattcccgttttcatggcgtctacgccgattccgtcaacaatcgtcgccagctgtgcgcgaatcgtatcggcatcaatcggaaatacttgatgatcccagctgttctccgggtccatcgctacgatcacggtcaaagccgtcattccgtatacgtttttttcttgaaatgtttttaaatcggcctgaattcccgcgccgccgctggaatcagaaccggcaatagtaagtgctttgtgcattgacatatcaatggcctccatcagtgttttatatctcattatagttagattttctcccgatcacaatacggaaggcttggaggaatgatttgacagccgcgggggatgtgcgtacaatacctacataagattactaggtaagggtgagaaaataaatgctcaacagggagcttgtaaagggaagcacggtcattctggtgctgacgctgctgaatgaacggcccatgtacgggtatgaacttgtgaaagaaatggagaaaagaagcgggaatgaactgcaaatgaaggaaggcacgctgtacccatcgcttcataagcttgaacgccaaagctatatttcttcttactgggaaaagcagaccaaagggcccgaccgaaaatattaccggatcaccgatgaaggaaaaaacattctagccgaacggacgaaggaatggaatctgttctccgctctgatggaccggatgctgaagcggggcgggcagaatggataaagacctttatgtgcacgaaatcagaaaagggctggaaggcaaggccggaagccgtgaattattaaaggaaatcgaaagccatattcatcatgccatttgtgttcatctggaaaaaggcaaaaccgaaagcgaagcgatggagcttattctgcgggaagtggggactccgtctgagattatctctgcttttcaaaaagcttcgacggtgcccgcgcggacttttatgctcttttatctgttctgcaactgcggtctttttgtgatgggggcgatgattacgatgatgcacgcgtggaggattcatcccgcagttgacgcgctgtggaaagggatttccgtgtcagtatggctgattatgatcggttatgtgctgtattggttccaaatcggctatcaagctggcaaagagttcggggctggcggcaaaaagcttgctgagcggacggtatgggcttcaatggtgccgaatctatgttttatgtttgtctttttgttcaatctggttccggctgggctgtttccttcggcggtcacaccgagttttgcggcagtatgcgccgttgtgacggtatgttttccgttttgcggcaaaataggtttttacgcaggcaggcagagacttgcctgatctttttcactatatacatagggaatctatataggggtgtttatatgagattaggttcgtggatgtacggcgcgtgcgcccaaatagccgttaccgtatttaccgtctgcggcttggttcttgccttgcccgttgtgagtctttttattatggttctgaatgggatgcaagacgctacttttgttgttttcagtattttgcttcttctattgttttatgcgctgggatggatttgggctgtttcgtttgcgcgtgagtggaaggtgaaacttttcgagctgcaggtcagctcgctcattccgctggcgggtatattatacttgtacattgacagcggggtgagtataccggaactgattcatgattggcatgaggatggatgtgcgcttgtcccgccggcttttgtctgcttgtgcacatgctatgcgatggtgttggtgcctgtttatcaatcaaaactgtggaatgccatggaggcgggcagacttaatgccaaggcggtatgcactgtttggggagaccttctgatcattctggttttgctggcggggatgacgtggatttgtttctgaatgggccgaaatcaaaaatcccccctgatctctccgccgctttatgttttaatagaacatgagaaaaagcagaaggagcgggtcatgaatatatcaattgtcatagtcacgtataatcggattccggctttgtgtgagctgctggagtcgatttccaggcagaccataaagccttatgaagtgatcatcgtaaatgatgccggggaatcggtcgaacaagcgaagcagctgtacagcgatctgccgattcagattattgatttagaacagaatgccggacatgtggaagcgcggaacgcaggtgtgaaaaaagcgtggggtgattatatcatgctgtgcgatgatgatgatttcattacgccgggccatttggaaagaatgacggctgcacttgctgatgcggattttgtccattctgacgcggaaattgtgtcatttgaagaacggggcggcacgagatacccggtgtcacgaaagccgttcgcctatacggcggattttgcggatatgcgggtattttccacgtacgttccgtcaggcagcatgtacagacgttctctgcatgacacgttagggtattttgatccggatgtccataattattgggactgggacttttatttgcgcgccgcgaaacagcaccgtgtgaagcgtgttccttgcgcgagcgtcatatatgcgttttttgagggaggcggcaatcagtccgcggatctcggcggcaaacggaagcggtacttagaccggttaagcgaaaagcacgggcttggggagctcccgacgaaaaacttcgcggttcttctagaagagccggacatgaagaggcgggaggcgccgactgacattgtgtgggacggaaagcccgtccattcaagactgcacagttcataagggggacggacagtttgaaacagcttttaaaagacagctggtggaatcagctgaaagatgaatttgacaaaccgtattatcaagagctgagagagatgctgaaacaagaatacagcagccaaacgatttatcctgacagccatgatatttttaacgccttgcattatacgccctatgaggatgtaaaagcggtcattctcggacaggacccgtatcacgggccaggacaggcgcacgggcttagtttttccgttcagcccggggtcagacagccgccgtctttgaaaaatattttcatagagcttcaggacgatatcggctgccccgtaccgaaccacggatcgctcgtcagctgggcgaagcagggagtgcttttgttaaacacagtgcttacggttcgccgcggtcaggccaattcccacaaaggcaaggggtgggagcggctcactgaccgcatcattgatgtggtgaatgaaagagagaagccgattgtctttatcctgtgggggcgtcacgcgcagatgaaaaaagagcgcattgacacatcgaaacacattattattgaatcgactcatccgagcccgttttcggcaaggaacggttttttcgggagcagaccgttttcccgtacaaacgccgcccttgaaaaaatgggggagcagccgatcgattggtgcatccccgacctgccgcaataaacggttttttgaggcgcttccgcccggcggaagcgtcttttttgatgttccgggcggtatgccgtcagaaaaaataacaaactcaattctgcgatccgctcagaaatttgataaaatgcaggaagaagacaaattactgctggaggatttactcatgaacatacatatctctgctttaattcagaagatggaagaagaactgaggcaggcgaaaacggcgacccgcaccgaggaggtcaaaatgcacgcggccgccatccgctctctgtgtgatgtcgtgctcggcactcagacgcacaccgctccggcgcctgtgcagaatccgattccgaaagcggcgccgaaaccttccgcgtctccttcgacagacccgctgctgcttgaaaaaatgatgggcagcgccgggctgaaccaatatcagaaaaaagcgaaagacgaacgtgaggaagacggaaacggggattccattttcgatttttaacaggagaggttgattgacttgaaactgatactcgggggtttgcaatggacggcatttatgattgcggctgcgattgtagttcctgtcgccatcgcacaatcatttcacttgaaccatgccgattctgccgcattgattcagagcacattttttgtgcttggcgtcgctgcggtcatccaatgtctccagggacatcgtctgccgattaatgaaagcccggcaggcttatggtggggcgtatacacgatttacggcggactgacgggcacggtgtttgcgacattcggcgagacgctgcgggcgctgcagggggcgctgttattaagcgctgtctttttctttttgttcagcctttttaaagtgattgaacggctggccgtgctgtttacgccggttgtgaccggtgtgtatctgctgctgttggtcatgcagctgagtcagccgattgtgaaaggccttttgggcatcggctatttaaaaaacagcgtcgacggccttgtattcgggctcgcaatggttgtgacggcggcgatgttcatcatgtcccgatcgaatgttacgttcttaagacagtatgcgattctcctttcgcttgccggcggatggatcttattcgccgtcttcggcgctgccaaaccgattcaaataccggatcgcgtgattcagctgccggttctttttccgtttggaaaacccgtgtttgacagcggcctgatcattacgtcactcttcattaccgtgcttttgattgtcaacatgctcgcgagcatccgggttgtagaagcggcggtgaaaaaattcggcggcaccgttgggaaacggcgtgagcgtccggcagggtttgcggcttcgatcagccaccttttgagcgggctgtcagggggcattgcgcctgtgccgatttcaggggcggccggttttattgagacgacgaagcttccttcgaaaaagccgtttcttttgggaagtgtatttgtcatgatcatcagtatgatcccgctatttatgaatgcgtttgcgagtctgccctcaccggtcggctttgcggtaaacttcgtcgttttctccacgatggcgggtcttgcctttacggagtttgactcttatgagaaagcggagcaaaaacgaatccgttccattatcggtctggcgctcctcacgggggtcggcgtaatgtttgtgccggagagcgcgttatcagggatgcatccgatcctgatttcgctcttaagcaacggccttgtgctcggaacgctgctggcgatagcgattgaccgaatccagcttatcaaaaagaaaaaatccgacaatctcgtgtcatcggatgacggacgttgaattttgccgatgttgggttatgattgaattggaaactttaacgaaaaggcgggagaaaaatagatgaaagtgtttattattcttggtgcgattaacgctttattggccgtggcgctgggcgctttcggcgcgcatgggcttgaagggaaaatccccgataaatatttgcaggtgtggcacacaggcgtgcaatatcatatgtatcacgcgctcggtcttctggctgtcgcgtttttggctgaaaagctctctggcgcaggcagtgtttctgttgcgggctggctgatgtttgcgggcatcgttctgttttcaggaagcctgtacgtattgagcgtgacgcagatttccattctcggcgcgattacaccgctcggcggcgtggcgtttatcatctcttggattatgattatcgtcgcggccgtcaaatatttataaagaaaaaaagccaatcctctgtcaagtgagcgattggctttttgatttatctcggagaataagaagacatggagtacggataagtataagcgatttcctcatcaaatgtgatgtaatcaaggtaaatggtcagaagcagatagcgggtgcccgttttcggatcgctgatgatgatatggtcacgtcccgccgcctcaatcacaccgcggaaaatctttgaattccattctttgctgttttcgaatgtcatataaatcgtcgccgttttgccccggttcaaccgcagaatattttcaatgtatgactcttcaatcggcagcatgccgggaacgttttgtgacgatgatggacctgacgggatttgaaagctgccgccgccctgctgctgcggctggccggggaaccccccgccgaagccctgctggccttgctgcatcggcattgtcatttgctgctgcatcggcatcatttgtgatccttggccctgaggctgcggataaggattaggcccgagctgcggctggaatccctgcatatccattcccatccccatcccctgcatttgctgatattgattctttttcggtttcatattgttcctcctttgatgaaaacctcttgatgctgaaacctcctgacaagtatcagacagccgacagagcggctgctgtttttatctattccaccatatgagcccaaagaaagatttatgcgaaaaaagaaaatacgatccaatgtttccggatatcagagccggctttttttgtgcgcgcaatgctgacttttcacataatagtctgtatccctagcgcatcttccgcataaggaacatatgatagcggtagtttcaggtgcgaaaagggggtgacgagttgcctaaagtgtcagtgatcatgacgagctataacaaaagtgactatgtggcccgctctattaaaagtattctgtctcagacgtttacggactttgagctgttcattatggatgacaactcaaatgaagagacattggcggaaatacgtccttttctcacggatgaccgcgtccggttttatcaaagcgatgtatcgggcgtcaaagaaagaacggaaaaaacacgctacgccgccttgattaatcaggcaatagaaatggcggagggcgagtacgtgacgtatgcgaccgacgacaacacgtatgtgccggaacggcttgagaaaatggtgaaagagcttgatgaagacccggaaaaagccgtcgtgtattcaagttccaaaacctatcatctgaatcagcggaaagagacggtgaaggagacggccaggcccgccgaacggatcgtgtggaacgcgccgtgcgccattgaccattgttcggtcatgcaccggttttccgtgctggaacaggtcaaatcggcattcggttcctattgggatgaaagccccgcgttttaccgtatcggtgacgcccgttttttctggagagtgaatcatttttatccgttttacccgatttctgaggaacttgatatcaattatattaccgatcaatccatccattatcagcttttcgcggcggagaaaaacgagtttgtgaacagccttccgcagcagaccacgtgccgggagctgagggaatcattaaaaaagcttggaaaggggtgagggcttgtcggcatacttagcgaactattgggtgctgtaccggcagtatattgacctttttcagtcacttcgctacaaagacatcccgctcgcattgatcagtaatttttatcaatatatcagtccggcgcttcgggagagcatggagcagaacccggagcttttcggtccggcggatcagcatattcctgaagccggtattcagccttattatgatcaaaaaaggcaaaacattaagaaaacagatgagaaaccggtaaacggaaaagtcattctgcatttcgatcatcttcggttcaccgagggaaattaccggcagtttgatccggcaaaaacagcggtactggccagatggagtctgcctgaccatcatgggctgcccgttatctgcaaattggagctgacgggaatggggcaaaaagggaaccccgtcccttatattgaaaaagcccattccattttgaaagagcttcacagccatcccgctttcggaaacagagaatttcaggaacgactgtataaagacatcccgttatttattgaagcgattgacgccgttgatattttgtttacggccgagaagatttccgccgttgtagtcggcacgacggaggatatttacagccgtgtgctggcgctgatgtccgcgaaaaaaaacgccgtcagcatctgtcttcagcacggggcgctcatgggagatgaagcgtttctgcccgtatttacggactatcaggctgtattcggggcttatgaagcggagtggtataaagcaaaaggctgcagggaggaacaaatcatcatcacggggcatccccgtttcgacgagattttctcaagagagccgatagatcgggacacgttttaccgcaaactttcttttctcccgtcacagcggacggtgctgatcgccacgcagccgttttctgatgaattttatacgggagtgcttgaagagcttgccggccaaaagaacatgcagctcattattaaaccgcatccgtgggaaatcggcaaaaacaagctggatgcttacaatcaggtgctgcggaaatataaagcaggcaaaatcatcaaaaaagagatggagctgtatgatattctcccgtttgttgacgctgcggtgacacagacatcaacggtcggtcttgaagcgatgctgtttcaaaagcccgtgctgatcggaaaatcagcgggaacccgccgatacccttattatcattcacttggagaatttgtttttgaggacccgcaggcactcgctcaggaattaatccggatatgcgaaagccccgcagaatatcaaaaagcggaacaggcgcgccgtgcttttgtcgccgcgaactacccggttcaggattcgcttgccgctttatgtcaagtgcttcaggaaaaaaccggagtcagcttcagacgggttgacccttcataaaaaagataggagcgcaaaaaaaatggtgcaaaaaagatcagcttttcttccctattcattgcccatgatcgggaaggacgaaattcaggaggttattgatacacttgaatcgggctggctttcaaagggaccgaaagtagaggcgtttgaaaaagcctttgccgcctggacgggggcaaagcatgcgatcgcgctgaactcatgtaccgccgctttgtttttggccctgaaagcgaaagggatcggtcccggcgacgaggtcatcacgtctgccgtgacgttcagttcaacagccaatacaatcgtgcacacaggcgccgttccggtgtttgctgacatcgatccgcttacgctgaatgcagaccctgaaaaaattgaggcggccgtcaccccgcggacaaaagcgattgtacccgttcatttcgccgggcagtcgtgtgatatggatcaaattttggccattgccgaaaagcatcagttatttgtcttagaggatgccgcacatgccgtgtataccacttataaacagaaaatgatcggatcaatcggtgatgcgacggcattcagcttctacgcgacaaaaaacctggcaaccggtgaaggcggcatgctgacgacggacgatgacgggcttgccgatcagatcagggtgctcagccttcacggcatgagcaaaggcgcgtggaaccgctattcttcaaacggaagctggtactacgaggtcgaaacgcccggctataaaatgaatatgtttgatcttcaggcagcgcttgggcttcatcagctgaaacggattgacagcatgcagcaaagaagggctgaaattgctagccgctaccaggacgctttcagagacatgaaagggctcaccgtcccatatgtcagtgatgacgggcggcatgcatggcatctgtatgttcttcaaatagaggagcaggaggccgggatcagccggaacgatctgatttccgctttgaaagaccaatataatatcggcacaagtgttcattttattccggttccgttccatccgtattatcaaaaaacgtacggatataaggaaactgattttccggccgcggccgcgtattatcaccgcaccgtatcactccctctttatccgtcaatgacagatgatgacgttgaatacgtcattgcagccgttacggatatcgtcaaaggggctgattaggtgtacagactgagagaaaatcttgcacaggacatgattcatgccttcctgcatcagaagggcattcagcccgaagcctatgaatcgtcgctctgtttattggaagaaaacagccttcaaggcgtgattttatatgaaaactcttcgtgggaaagtcaattgttccgaaaaaatatcatcaatgtgaagcttgcagccgcaaacagcaccggacagctcaaaaggctgtttcaggaattttacgcggcaaggcgggcggacggcactgattttatatttattaaaataccagctgaagatatcggcgcgatgcaggtcgtgcagtcgcttccgaacgcttattttgtagggagtcttctcaagctcgtcagtccggtgcgtgtatataacagcacgccgccgtttgagattacagaagccggacccggcgacacggaagcgatcagccggctggcccgcgacgcctttacaaaaagcaggtattatcaggacccccatctcagctataaaagtgcaaaccgtctgtttgaagagtgggcgcggaataacgcggaaggcagagcttcgttacaattcctcgccaaatataagggagagaccgcgggctttgttcaggggctgtctaaaggcgatgaattcgtccttgatctgatggcggtaaagccgggatttgaaggaaaaggagcgggattccatttagctgcgcacgtgattgaacaatcattgcgctttcagcataagactgtatcagcgggaacgcagctccacaatgtaagagccatccgcctgtatgaaagaatgggatttaaagcggatgcgtccttttactactatcatgtgtggcccgggaaggaggcggactgatggcatcatgcaaaatcggaacgaagtcaatcggcgaaggttcgcccgtattcatcatcgccgaagccggaattaatcatgacggaaaactgagccaggcgtttgaattgatagatgcggccagtgaggccggcgcggatgcggtcaagttccaaatgtttcaggctgacaaaatgtatcagaaagaccccggcttatacaaaaccgctgcgggaaaaaacgtctctattttttctttggtgcaatcaatggaaatgcccgctgagtggatcgaaccgctgcttgaatattgtaagaaaaaaggcgtgctgtttttaagcacggtatgtgacgaaggctctgccgacttactgtatgcgacttccccttcagcttttaaaatcgcctcctacgagctgaaccatctgccgttattgaaatatgtcgcggggctgaagaccccgattatcttttccaccgcgggcgctgatatttcagatattcaggaggcttatcaaaccattaccggcgaggggaacaaagaaattgcgatcatgcattgtgtggcgaaatatcccgcgccgcctgaatacagcaatctgagcgtcattcccatgcttgccgccgcattcccggatgctgtgatcggtttctccgatcacagcgcccatccgtatgatgtgccgtgcgcggctgtcaggctcggagcgaaactgattgaaaagcattttacgatcgataaaaacctgcccggtgctgatcactccttcgccctcaatccggatgaattaaaagaaatggttgcggcgatccgctcagttgaagcggagctgcggcaggggcatcacgctccggtgccggaagtgctgtcgggaagctcccataaaacgacgacaccgattgaaggggatatcagaaggtttgcttacagaggcattttttcaacagcgccgattcaaaaaggcgaatattttacggcggaaaaccttgccgtccttcgtcccggccaaaaaccgcaggggcttcacccgagatattttgagcttttaactgacggcgcgcgtgcggtcagggatatccccgccgacacgggcatcacttgggatgaccttttgacgaaaggcagcccatatgatgactgacattttgtttatcattcaggcgcggatgggaagcgggcgtcttcccggcaaagtgctgaaaccgatcggcgggtatacgatcctcgatatgattgtcaaaagggttcgtcaaagtgcgttttacgatcaatcacgggataatctgatcgtcgccgcgtctgacagcaagaccgacgacattctgtctgcgcactgcctcagcaaccgctaccgtgtccaccgcggcagcgaacagcgtgtgcttgaccggtttgcacaagtcatcgaacaagtaaaaccggacatcgcagtcagactgacgggggataacccgtttgtcgacccttcgctgcttgattttctgattcaatcgcatttagatcagcacgcagactacacgtatatctgcggtacaccgctcgggatcggcggcgaggcggtgaacgcgcgccttttaacggagatcaatgcggacaaaacgctggcggacaaatatcaggagcatgtcacccttttgataagagaatcccctgagaggtaccggcttctctttcctgagcccccgcaggaactccgggctcctcacttgcggatgaccgtcgatacagaagaggactacaggctggcccgcgagctgtacgtaaaagcgggctcgcgtcctgatattccggcaaaagaattgatccatctgctgaatcgtgatccggagctcagggccattaatcaaatgatccggcaaaaagaggctgattagcgtgcgggttttgattttcgcggacgggggccgtgacatcggcatggggcacgcggttcggatgaagctgcttgccggtgccattaagaacaactgctcaataacgttctacacaaataaagaggcttcttcttatctatcatctgatcaatgggaagtgatcatcaagcctgacaagggacagaaggaatttattgtccgggaaataaacacgcgggctcccgaccttctcatattcgatctgctcgatatgccgtgtgactggctggaggaaatcaaaaagcattcatcggctcgtatcgtcttatttgaagaaaagagggaacatgtcattcatttatgcgatgccgttataaacggcatttacggcgggctgaaaagccggacggttcaaatgggcagcgccgcggtatatgaaggcccggattatatgattcttcatccgggttttgaaaaagcaaagcagctctatcagctgagaaaagaatgccgaaccatattggtctctttaggaggaagcgacccgaagaagcttgtctttaaagtgatggaagcatgccgccgcatccctgatattcagcggaaacgagtgatcatcgtcatgggcggcgcggcgcctcatgctgatgacgtgcgcgcgcatctcacacaaatgccttatgccgagatggtaaggcagacaaatgacatggccgcgcttctcacgagggctgatatggccatcgtgtccggcgggatcaccttatatgagaccatttgtacaggtgtgccctgcatcgttctttctcaagtggagcatcaaactgagacggcggaaaaattcgccgcacgagaggccgccgttcatctcggcctgggagaacacaccgcggcggacgtgctcgctcggcatatgtctgagctggctgctgattatccgagacggctcgggcttcatcagaacggaaagccgctggttgacggcaggggcattaaacgggcggcggcgattctttatgatttgtgataaaaccacacgtaaggaagtgttcatgtgaaaggtgttatcttagccggaggcaccggctcacgccttatgccgctgacaaaagcggtcaataagcatttactccctgtcggtccatatccgatgatttactggtcgatcatgaagctggaagaagcggggattacggatatcttgctgattacgcaaaaagaatatattccgcaatttcataaacttctcgaaaccggagaagagctcggcgtctcaatcacatatcaggttcagccagccgcatccggcatttccgacggtttatcatacgcaaagcggtttaccgggcgcgatccgttcgttctgcttttgggagataatatttttgaagattcattaaaaccttatacggagcgtttcgcaaagcagggaaaaggagcgaaagtgctgctgaaagaagttgacgatccggagcgcttcggcatcgccgagattgatgaggaaaacaaacggatcaagtcgatcattgaaaagccggagcagccgccgaccagactatgcgtcacggggatctacatgtacgacgcagaagtgttttcttatattgaacaaatttctccttcaaaacgcggcgaactggaaattacggatgtcaataatttatacattgaacacagtgagctgacgtatgatgtgttaacgggctggtgggtggatgcgggcacgcatgaatcgctctatctcgccggaagcctggcgcatcaggcattacagaaaggacaggagcattaatcatgccaaaatcatatttaattacagggggcgccggatttatcggccttaccttcacaaagatgatgctgaaagaaacagatgcgcagattaccgtcctggataatctcacgtatgcaagcaggccgcttgaaatagaagccttaaaaaagaacggccgtttccgttttatcaaaggtgacatttctgaaaaagaggacattgacaaagtcttttcccaaatgtatgacgctgtcattcattttgcggctgaatcccatgtggacagaagcataaatcaggcagagccgttcatcacaacaaatgtgatgggcacataccgactggccgacgcggtgttacagggaaaagccggcaggctgattcacatttccacagatgaggtgtacggagatttggcgccggatgatcccgcttttacagagacgacgccgctttctccgaacaatccgtattccgccagcaaggcaagctcagacctgcttgtcatgtcttatgtgaaaacccataagcttcctgccatcattacgagatgcagcaacaattacgggccgtaccagcaccacgagaaaatgattccgaccattatcaggcatgccgtaaacggcacgccggttccgctgtacggcgacgggatgcagatcagagactggctgtttgccgaagatcattgccgcgccattaagctcgtgctggaaaaaggaacactaggcgaaatttacaatatcggcggaggaaatgaacggacgaataaagagcttgcgtcatttatcatgaaggagctcggtgtcgaggaacggtttgctcatgtcgaagacagaaaagggcatgaccgccgttacgccatcaatgcttcaaagctgaaaaatgagctgggatggcggcaggacgtcacatttgaagaaggaatgagaagaaccattcgctggtatacagacagccaagactaatcggaaagaaggggatccgattgacgaaggtattagtaaccggagcggccggtcagctggggcgggagttatgccgccagctgaagcgggaagggtatgaagtgatcgccttgacaaaagcgatgatgaacatatccgaccagcgttcggtgcggcactcgttcagccattacaagccggatatcgtcgtcaatacggcggcatacacctccgttgacaaatgtgaaacggagctcgacaaagcgtatttaataaacggaatcggcgcttattatgccgcgcttgaggctgaaaacaccggcgcgaaattcattcacatcagcaccgattacgtcttcagcggcaaaggaacacggccataccagaccgatgatcccgcagatccgggcacgatttacggaaaaagcaaaaaactcggcgaagaactgatccggttaacgggaaaaaaccacaccattatcagaacgtcgtgggtgtacggcagcggcgggcacaactttgtcaatacgatgctgaaacttgcggatacacatgatcaggttcgtgtcgttaacgatcaagtcggagcgccgacgtacacaaaggatttagccgaaacggtgatcggtctgtttgacaggccgccgggcttgtaccacgccgcaaacagcggagtgtgcagctggtatgaatttgccaaggctatttttgaagaaagcggcagaaccgccgccgtgctgcccgtcacgacggaggaatacggaaatgagacgccgcgccccgcttactcggtgttgagtcttgagtcgattgaacggcaggggctcggcatgaggcattggcgggaagcgctaaaggattatttacaaagggagggacagtgcaagtgatcgaaggcgtaaaaattaaaaagctgatcaaacacagcgatgaccggggttttttctcagaactcgtccgtgacgatgaacatctcttagagcgtttcgggcaggcttcctggtccaaaagctatcccggcgtcattaaagcgtttcactatcatgagaaacaggatgacctgtggtttttcccgacgggccacgcccaggtcgtgctgcatgaccttcgcgaagagtcggcaaccaagggagaaacggatgtctactacatgggagaagacaatccgatgctccttctcattcccaaaggcgtcgcacacgggtacagagtgctgggcgaaaccccgctgaccattatttatttcacgacaatgtcctacaatccggatcagcctgacgaaaaaagaatcccgtggaatgatgagagcatcggatttgactggcagacggctcatcggtagcgcacaagacgaagacagcggatgtcttcgttttttgtgctggttcatctcgtgaaaaataaatgattgaatattccaaaaaataatttacttccatggataaaggtggtagattattctcaggaaaagagaaacccaattcgcgaatggaatcatcagacacgcttttccggcagaggacgctctgaatcctatatgatctggaggaattcatgatgttaaaaagaaaatcattttctgcctttctcatcagtgctgcggtattttcagctgtgttcttgccatcttttcatgcgaacgcccaatctgccgttattgaagcgaaaaccgtcaatagtacgaaagaatacgcgacgtctgatattgaagtcacatacaagccgaatgcgctgcttgccgtcggcgccgttgaatttcaatttcctgacgggttcaacgccactgtgagggactctgtaaacggaagaacactgaaagaaacgcaaattctcaactacggaaaaacggtcagacttccgcttacccttgacttattgggcgcgtctgaatacaatctcgtcctggtgcgtaaaaaccttccgcgcgcgggcacgtatacaattaaaggcgattacgtaaacggtttgggggccggcagtctctacgccgaaacaaagctggttattgacccgcgttaatccgggatgaaagaggctgacaacagcctctttttttatgcgcaaaatcctggcatgaatcttgcatataaaaaggggtgtaacgacaatgtgaaagggattgatgggttttggtgtaaaagcgcttacatttcgttctgccggtaattgaagcttacacgtaaaatacgatgaggtgataaaacatgtcagccaacccgctttctaaaagcactcagaaagatgaagaaaaagaagttcttaatttgttcttgtccacacaatcgatcataaaagaagccctgcgcaaactgggctatcctgacaatatgtatgaactgatgaaagagccgatgcggcttttgaccgtacgcatccccgtcaaaatggacaatggctcagtacaggttttcacgggctaccgctcacagcataatgacgcagtcggcccgacaaaagggggcgtgcggtttcacccggaagtcagtgaagaagaggttaaggcgctttccatctggatgactttaaaatgcggcatcacaaatcttccttacgggggcggaaaaggcggcatcatctgtgatccgcggacgatgtcattcggagagctggaacggctgagccgcggatatgtgcgcgcgatcagccagatcgtcggcccgacaaaggatattccggctcccgacgtatataccaactcgcagattatggcatggatgatggacgaatacagccgcctgagagaatttgattcaccgggattcattacgggcaaaccgattgttctcggcggttcacaggggcgggagacggcgaccgcgcaaggtgtcacgatttgtattgaggaagccgttaagaaaaaagggattccgttggaaaatgcgcggatcatcattcaggggttcggaaacgcggggagctttctcgctaaatttatgcatgacgccggcgccaaggtgatcggcatctcagacgcccacggggctttgtatgaccctgacggccttgacattgattacctgctggataagcgggacagcttcggcacggtgacgaatctcttctctgatgtcataacgaaccgggagctgctggaaaaggactgtgatattctcgtgcctgccgcaatctccaatcagataacggctgaaaacgcccatcacattaaagcctcaatcattgtggaggcggcgaacggcccgacaacgatagacgccacgaaaatcctgaatgaaagaggcgtgcttctcgtgccggacattttggcaagtgccggcggcgtgacggtgtcttattttgaatgggtgcaaaataatcaaggcttttactggtctgaggaagaagtcgccggaaaactgcgcagcgtcatggtgaattcgtttgaatccatttatcagacagcgcatacccacaaagtcgatatgcgtttggccgcctatatgacgggcatcagaaagtcggctgaagcggcccggttccgcggctgggtataagtgttatccgcaaagagattttgcatcagttatatagcggatcgcaaaatttctttgcgttttcagattgcagctgacaggttcggacaagcttcgtccgctttcggcaaagattttcctatttttatcacaaattgctatgctggtatgcttcttgcatcttcattaagcgtgagcacacattacaaaatacggggaggaattctaatgacagtttcatacgcacacgaaccatttacaaattttcaggaagagacaaataaacaatcgtttcaggaagcgctggcttatgtgaattcacagctcggcaagcattatccgcttatcatcaacggtgaagcgattgaaacggataaaaagatcatttccgtcaatccggcagataaaaaagaagtgatcggttctgtatcggcagccggaaaagaacttgcggaaaaggccatgcaggctgcgctgcaggcatttcaaacatggaaaaaagtacggccggaacaccgcgcgaatgtgctgtttaaggcggcggcgatcatccgcagaagaaagcacgaattctccgcgtacctggtgaaagaagcggggaaaccgtggaaggaagcggatgcggatacggcggaagcgatcgactttttagagtattacgcccgtcagatgctgaagctgaaagacggttctcctgtaaagagccgtgacggagaatataatcagtatcactatgagccgcttggggtgggaattgtcatttctccattcaacttcccgcttgcgattatggccggaacggcggcagccgccatcgtaacaggcaacacgatactgctgaaaccggcggatgcggcgcctgtcgtggcggcgaaattcgtagaagtgatgaaagaagcgggcctgccggacggcgtgctccaattcataccgggcgacggaggagaaatcggcgactatctcgttgagcatccgaagacgagatttgtgtcgtttacaggctcccgcgcggtcggatgccgcatctatgaacgcgccgcaaaagtacagccgggccaaaagtggctgaaacgggtcattgccgaaatgggagggaaagatacggtgcttgtagacagagatgctgatcttgatcttgccgcttcctcaatcgtgtattccgccttcggattctcaggccaaaaatgttcagccggttcgcgcgcggtcattcatcaggacgtctatgatgaagttgttgaaaaagccgtcgctttaacaaaatcactcaccgtcggaagtccggaagattttgatacatacatggggccagtcatccacgaagcatcttataataaagtcatgagttatatcgaaatcggcaaaacagaaggaaaactcctgacgggaggcgaaggtgatgattcaaaaggatactttattcagccgaccatttttgcggatgttgatgaaaacgcccgcctgatgcaggaggaaattttcgggccggtcgttgcgatctcaaaagcccgtgatttcgaccatatgcttgagattgccaataataccgattacggactgacgggcgctctgttatcgaaaacccgcgcgcacattgaacgcgcccgcgaagattttcacgtgggaaatctatacttcaaccgcggctgtacgggagcgattgtcggataccagccgttcggcggcttcaatatgtcaggaaccgattcaaaagccggaggacctgactatctgattcttcatatgcaggcaaaaacaacgtctgaagcctattaatctttcggaaatagcgcgatgaaaaagagagtcgcgctattttctctatatgagggtaagggggatggaacatgtatcagcagctcagcaaaatgcttccggaggagaaaatagaagccattacgaaatcactggtggcgttaaacagcatcaacggcacattgggagaaggaaaaaaagccgactatatcaaagatatgatcaagagctttccctactttcaggagaatccgtcacatgtgtgggagcaggcgattcctgaggacccttacggccgcaaaaatattttcgcatttattgagggaaacggcgaaagcctgaatacggtcatttatcacgctcatcttgatacggtcggcatcgaggatttcggccctttaaaagatatcgcttttgattccgaccgtctcgcggaatatttctcaaactatgaatttgatcgggatgtgcagcgggacgcccgctcaggcgagtggatgttcggaaggggttcggttgatatgcagagcggtattgccgttcatctcgccaatctgcttcacttttctgaacggcgcgatcagctgccgggccatattctgttcatggcaaacccggatgaagaaagccagcattccggcattttaaccagcatttctgaattaaaacggctgaaacaagaaaagcagcttcgttatttagcagcgattaataacgattttatcacgccgctgtatgagggtgacacgacaaggtacatatacacgggcgcggcagggaagcttttgccttgctttgcgatttacgggcgggaggtgcatgtcggagatacgctgtccggcatcgatccgaatttgatcgcgtcagaaatcaccagaagaattcacaacaatattcatatggcggaaaacattgaaggggagcttgtgcttccgccgacctgcctctaccagcgtgacaataaggaagcgtataacgtgcagaccgccgtcagcagctatgtctattttaattattttatttacgagaaaaccgccaaagaagtcatggatcagctgaccgccgtggctgacgaagcctgcaaagagacagaacaaaaattatctgattattacgacgaatactgtgagagaacgagcctgccgaaaaaagagatgtcatggaacgttcaagtgtacagtctggaagattacctgaaaaggctgagaagccgcgggatagaccctgcacagtgtatcgggcaggcatttaaaacatatgaacatcttgaactgcggatgagatgttttaaagccgtcgaagaactgcaaaaactcgatcctgagcagggagccaaggtcattattttctatgcgccgccttaccttccgcacaattatctgaaggaagaaagcacacgggaccggcttttgcagcatgtcattcaagaagcggtcgataaaacagcggcatcaaccggagaaacattcgtctttaaaaagtttttcccttatttggcggacggaagctttttatcgctgcatgaaacagatgaggaggtctccgcctttaccgataattttccgggctgggatgtcatcgggacgattccttttaatgaaatcagggaattgaatattccgtcggtcaatataggggtatacggaaaggacggccataaatggacggaacgcgtgtacaaaccgtacacattccatgtgctgccggaactcattcagcagacgacaatgcaccttttgcacagctgccgattagacatacgcacaaatggctgacataacggaataagggggatgtatatgcagggagataccaatcaaaatgaattgcagcgcacgatgaagggccggcatttgtttatgatcgccctcggcggcgtgatcgggacggggctttttctgggctccggttttacgatcagtgaagcgggaccgatcggcgcgatattggcttatgtgatcggcggatttttaatgtacctggtgatgctttgtttgggggagctcgcggttgccatgccggtcgcaggatcatttcaggcgtatgccgcaaagtttctcgggccgtcgacgggatttacgatcggatggatgtacgcattcagctgggccaatacagtggggcttgagctgacgtcggcggggattttaatgcagcgatggtttccggccgttccgatttgggtgtggtgcctggtatttggcgtcgtcattttttccattaacgcgctgtctgcgcggagttttgcggaaatggaattttggttttccagcattaaggtcatggccattgtattgtttattattctcggctgcgctgcggtattcggctttgtcggttttaacggcgggcagacggctccgtatctgtcaaactttacgacggacaaagggctttttccgaacggcgcccaagccgtgctgtttacccttgttatggtgaatttttcattccagggtaccgaactggtcggaatcgcctcgggagaaagcgaaaatccggaaaagacgcttccccgctcgatccgaaacgtcatatggcggacgctttttttcttcgtgctggcgatgtttgttctcgtgtccattttgccgtatcaaacggcaggcgtcatcgaaagcccgtttgtggctgtgctggataaaatcggcgttccttatgcggctgatatcatgaactttgtcattctgaccgccatgctgtcggtggcgaattccgggctgtacgcttcgtccagaatgatgtggtccctgtcaaaaactaagatgggccccgcttccttaacgaaactgacgaaaaaaggcgtgcctctgaaagctcttttcatcaccatcgccatctccggtttatccctgctgacaagtgtagtcgcggctgaaacggtgtatgtgtggctcatttccatctccggtatgattaccgtcgtcgcgtggatgtcaatctgcgcttcacaattcgttttccggagacgctttctcgctgaaggaggaaatctgaaggacctggcatttaaaacgcctctttatccgatcgtgccgattctcggattttcggtttacggtcttatcttaatcagtctcatctttatccccgaccagcgtatcggtctgtactgcggtgtcccgctgatgatcatctgttacgcgtattatcacttcggtatcaaaaaacgcctgaagcgtgagccggcttcttcggaaaaaggcgctgccggataagaaaaaaagcccttcgcttaaagcggcgggctttactttgtgtttcgtttggccgacagaacataggatagaacggcacagaactgaaaaccgaaaatgctgacggccatcggccaggcattttcttctccggcaataccgacaaggggagcggcagccgcaccgccgataaagggcaggagtccgagaagagccgcagcgcttcccgcgcctttctcctgtttctgcatagccaaagaaaatcccgtcgtcgtgacgatcccgacagaagaaacaatgatgaataaagaaatgcagactgccgccaggcctaaaccaaacgcaagtgataaaagcaaagcgatgctcccgatgacggcaatcatcagaccggagacaaacagcttccgttcatcatgtgttttggccatccgtccggtgatttgggtggcgcatatgattcccgcaccgtttacggcgaacagcaggctgaacatttgggccgatacgccgtagatgttttgcagtataaacggcgacccggcaatatatgcgaacatgccggtcatcacaaatgcctggctgagcgcaaatcccataaacatccggtcgccaagcaggccgcgaaacgtcatcagcgtctcccggagtccgccgcttgtccgcttttccggcgggagtgattcaggcaacaccgtaagcacggcggcagaaatgatacagccgattaccgccagcacgataaatacgattttccagccggcgaactgaaggataaatccccctgtaatcggcgctaaaatcggcgccgccccattgacgagcatcagtaatgagaaaaaagccgtcaattcttttccggaatacatatcgcgtgcggaagcccgtgcgatgacgattccggccgccccggtgaaaccttgaataaacctcatgacaattaaaaacgaaacagaagggctgaaggcgcataataaagaagacagcgtataaagcagcaatgacagaatcagcggcttccggcgcccgatcatatcactgagcggcccgacaacgatctgcccgacagccagacccaaaagacaaaacgtcaggctcagctgcgcaagtgacgctgtcgtatgaagatcggccgccacttcaggcaaagcgggcagatacatatcgagcgaaagcggcccgaatgaagcgagcgtcccgagaatcagtaccatgccgaggcctgcgcgggcggcctttgaatcagcgttattcatttcatgacccccaccttaacaaatgattctatcactatagcataaccagacggcgtattttatatcatttattgaatataaactaaatattttatttaaaaatctgaatgtaaataaaaaatcagaattagttttcatgtgaaatgtaaaatgaaatataaggatgctaaactataaaacaacaaaagatagaaaagttttacggaagaggtgttcaaagagcatgaacagcaaacaaaccgatcacatcgaaacgaaacgccgatttccggtctgtctcgcgcttgctttgacattaggcgtatttgccgcgggttctgaagagctggtgatttctccgctgcttccggatttagcgcgggctttcagctcggatgtcagtgtgctggcgctttccatcagtatttacggagtgatgatttttatcggggcgccgcttctcgttccgctgggagataaatattcccgggaactcagtctgctggcgggactgcttatatttacggccggcacggtgatctgcgcgctggcgcacaatctctttttcttctttctgggcagggcgctttccgggcttgcggcgggtgcgtttgtgccgacagcatatgcggtggtcggcgaccgtgtgccttatgcgtaccgcggcaaggtgatgggtctgatcgtgtcaagctggtcgctcgctttgattttcggcgttccgatcggctcttttatcggcggcgttttgaattggcggtggacgttttggattttcgccctcatgtctgtcctcgttgcttcgctcattttcattgaggcgcgccgcagcacggcggatgggaataaaacagaagaggaaaacggacggcaggcaggcactttccgggatgcgctgaaggtgccccgtgtccctgtatatctcacgatcactttttgcaacatgatcggtttttacggcatgtattcctttctcggcacatatcttcaccgcgtgctgccgggtgggaatacagcttcagggctgctgatcatggtgtacggaatcggtttttccatgagcgtgttcaccggaaaaatcgcagataaggcggggaaaatgcgctctttgatcgcggcattggccgtgatcagcatatggctttcctgtctcgcctatgcgccgtcatcaatgccgtttttggtcatcgggttattcgtctggggattgatgcaaagcctgacggtgaccttgctcagcactattttaagtgattgctcacagagccgccggggcaaaatcatggcattttacagtctggcgtccaatttggccgtcaccttgggttctgctgtcatgggtccggtctatgtcggatatggatatgcagctgtcggatttatctgtgcggccgtcaccctcatcggctttgtcctcagcgttttcgcatacagaaggtatggaaaatatgagcataagaccgaccaatcattgtatcggtaaaataaagtttctataattttgtaaatgtaaatttttaacaccttatattataaggtgttttctaatatataggaataattatcaatattttcaaataatattgacagcttgaacgtctatggataatatttacttaaaatttaacagattggttggtgctcatgattatattggataatagcattcaaacaaaaagcaaggcttattcaatatctaaactgattacgatcaacacgctcggtcctgaagggacaagcagtgagtacgcagcaaaaaacttcatcaccaatttcacccttctccaaggggtgaacagcaaattatcattgcatgatacatttgaatcgtgcattgaaaaaacgcttcaaagtccgctggaatacacaattgtgcctcacgcgtatgacggcattaagcacttctacatgagaccggatctgcagcttctgcaaattttcaggtgcgacaccccgatgtacggcctggctgtccggcccggttttgaatatacggatgacatgcttgataagactgtcatcgtatcccacccgtctcctatcaatttgattaagtattttacccgtaaagatgtcacgtttgatctggtgaactcaacgagcgcagccgcgaaaagagtgaaggacggtttgtccgacatcgcgctgacaaatgagctggccagacaaaagtacggccttcactttgtcaaaacatttaaaagcattcccatgagctggtcattattcggaaaaggagagattcatgatgaaaactgaacaagatttgcaggaactttatttcccgacgcctaaattaatagaatgggataacggagtaagacaatattcgtccgtcagaggcgatacggaagttctgctttcttacgttccgccgcatacaaacgtggaaccgcatcagcataaggaagtccaaatcggccttgtcgtttccggcgagctgtccatgactgtcggagatgtcacaagaaagatgacagcgctggaatcagcctatatcgcgcctcctaacgtgcctcacggcgcaagaaatgagacggatctagaagtgatcgccattgatattaaacgcctgaaagccggtgaaacctatacaagccctgaggattattttttgaatatttttaaaacgagagacttattgcctgggatggaagtcacgttcttcgtggaagactgggtggaaatcatgcttgccaacattccgggcaacggaggagaaatgccgttccataaacaccgcaatgaacagatcggcatctgcatcggcggtggctatgatatgaccattgaaggctgcaaagtggatatgacattcggtacagcttatttctgcgatccgagagaagatcacggcgccatcaacagatttgaaaaagattcaaaatcagtcaatatctttttccctccgcgctataacagagcaaaagcgaaaaaattagaggcgaaagagtcatgaacctgacggataaaacggtcctcatcacagggggcgcatcaggcatcggttatgccgcggttcaggcgtttctgaatcaagaggcgaatgtggtcgtcgcggatattgatgaggcgcagggagaagcgatgatccggaaagaaaacaatgacaggctgcattttgtgcagacggatattacagatgaaccggcatgtcaaaacgccatccggtcagcggttgacaagttcggcggattggatgtgttaatcaataacgccggcatcgaaattgtcgccccgattcatgagatggagctgagcgattgggacaaagtgctcaacgtcaatctgacgggcatgtttcttatgagcaagcacgcgctcaagtatatgctcaaaagcggcaagggcaatatcattaacacgtgctccgtcggaggagtcgtcgcatggcccgacattcccgcatataacgcctctaaaggcggcgtactgcagctgacgcgttcgatggccgtcgattacgccaaacacaacatccgcgtcaattgcgtgtgcccgggaatcattgacacacctttgaatgaaaagtcgttccttgaaaacaacgaaggcacgcttgaagaaatcaaaaaagaaaaagcgaaagtcaatccgctgctgagactcggcaagcctgaagaaatagcgaacgtcatgctgtttctcgcttcggatttatcaagctatatgaccggaagcgcgatcaccgcagacggtggatacaccgcacaatagagaaggagtgtttacatatggagagaaaaacagtattggttatcgctgaccttgggggatgcccgccgcatatgttttacaaaagcgcagccgaaaaatacaacctcgtcagctttattccgagaccttttgcaattacagcctctcatgcggcattaattgaaaaatactcgattgcggtcattaaagataaagactattttaagagtctggctgattttgagcatcccgattcgatttactgggctcatgaagatcatgacaaacctgaggaagaagtcgtcgaagaaatcgtcaaggtggctgacatgttcgcggttgacgccattacgaccaacaatgaactgtttatcgctccgatggcaaaagcgtgtgaacgtctcggcctgcggggagcgggcgtacaggccgctgaaaatgccagagataaaaacaaaatgagagccgccttcaaccgggccggcgtcaagtctatcaaaaataaacgggtgacgacgctggaagatttccgcgccgcgcttcaggaaatcggaacgccgcttattctgaagcctacatatctggcgagctccatcggcgtgacgctcatcaaagagagggaaacggcagaagcagaatttaacaaagtcaatgaatacctgaagtcgattaacgtaccgaaagcggtcacgtttgaagcgccttttatcgcggaagaatttttgcagggcgagtatgacgactggtacgaaacaagcggttattccgactatatcagcatagaaggcatcatggccgacggggaatacttccctgtggcgattcatgataaaacaccgcaaatcggattcacggagacatcgcatattacgccgtccatcctggatgatgacgcaaagcggaaaattgtcgaagctgccaaaaaggcgaatgaaggactcggcctcgaaaactgcgcgacacatacagaaattaaattaatgaaaaaccgggaagccggactgattgaatcagcggcgcgatttgcgggctggaacatgattccgaatattaaaaaggtcttcggcgtcgacatggcgcagctgttattggatgttctctgtttcggaaaagaagccgatctgccgaaaggattattggagcaggagccatgttatgtcgccgactgccacttgtatcctcagcatttcaaagagaacggccagctgcctgagacagctgtcgatttcgtcattgaaagcattgacattcccgacggcgtcttaaagggagacaccgaactcgtttctttctcggctgccgaggcgggtacatccgtggatctgcggctgttcgaagcgttcaacagcattgcggcgtttgagctgaaaggaagcaattcgggtgacgtggccgaatcaatcaaacaaattcagcagcaggcgaagctgactgcaaagtatgcgttaccggtatgaaacagctgaaaccgaactcgaagtatttgcttttcgggcaggcgctttcgtttatgggagactattgcgttctcccggccctgctcattttgtctacatactatcatgactactgggtgacgtccggcgttatcgcggtccgcagcattccgatggtgtttcagccgtttttaggcgtgctcgtggacaggctcgacagggtgaaaatcatgctgtggacggatgtgatcagaggtgtcatctttttggggctgacatttctcccgaaaggcgaatatccgctgctttttctggcgctgctgtttgtctcgtacggaagcggcgtgttttttaacccggcacgtctcgcggtcatgtcgtctttagaagcggatattaaaaatatcaacactttgtttgcaaaagccacgacgatttcgattattgtcggcgctgcagccggcggactttttctgttaggcggttctgtggagcttgccgtcgcgtttaacggggtgacctatcttgtctccgcgtttttcatcagccgcattaagcttcaatacgtgccgattcagtcagaaaacgtaagagaagcttttcagtcgtttaaagaaggcctgaaggaaatcaaaacaaatgcttttgtgttaaacgccatgttcacgatgattacgatggcgcttttgtggggtgtcgtctacagctatttcccgattgtcagccgctttttaggcgacggggaaatcggcaatttcatcctgacgttctgtatcggcttcggcggctttatcggcgccgctcttgtcagcaaatggggctttaacaacaataaagggctgatgtattttacagtgttatcgatcgtctcgcttgcgctgtttttgtttaccccgattttcgccgtgtcagtcattgccgccattcttttctttatcgcaatggaatacggtgaagtgctggcaaaggtcaaagttcaggagaacgctgcgaaccagattcagggccggatcttttcggtggcggaggcgtccatcggattgtgcatcgccgccggttccatgctgatcaacattgtagacgcggcagtcatcatggcgtttatcgtccttttggtcagcgggctgtttctgcatacaaaactggtcaataaatccttttcagaacggaataacgaatcagagcaaatccatttataaggagccttccagatggaaatcataccgtccgatgtcatcaagacacttccgaaacaggaattttcgctcgtttttcaaaaggtaaaagagatggagaaaacgggagcccagattattaatctcggccaggggaatcccgatctccccactccgccgcatatcgttgaagcattgcgggaagctgcgctgaatccttcatatcacggatacggccctttcagaggctatccgtttctgaaagaagccatcgcggaattttatgagagagagtacggggtatcggtcaatccggagacagaagtcgcgctgttcggcggagggaaagcaggtttgtacgttttgacgcaatgcctgctgaaccccggcgatatcgccttagtcccgaaccccggctaccctgagtatttatcgggaatcacaatggccagagcggagctgcatgagatgccgcttcatccggaaaacggctatctgccggattttgagcggattgatcccgccgtcctgaaaaaagccaagctgatgtttttgaattacccgaataacccgacgggcgcgactgcggatcaggcgttttatgaaaaagcggctgcgtttgcaaaaaaatatgacatccatcttattcacgattttgcatacggcgcgttcgaatttgatcagaacccggccagctttcttcaggcgaaagaagcgaaaacggtcggcgcggagctttattcattttcgaaaaccttcaatatggcaggctggagaatggcatttgccgtggggaatgagaaaatcattcaggcggtcaatgagtttcaggatcacgtcttcgtcggcatgttcggcggccttcagcaggcggcagcggcggcgctgtcaggaaatcctgagcatacggagcgtctgaagcgcacatataaagaacggattgattttttcacggcgttatgtgaaaaggaattaggctggagcattgaaaaaccgaaagggactttttatgtctgggctgaaattccgaatgaattcgagtcttcacaccagttttcggactatctgctggagcatgcccatgttgtcgtgacgcccggcgagattttcggcagcggcggaaagcgttatgtcagaatatcaatggtggcaaaacagggcgatttaagggaattcgtgctgcggattcaaaagctaggtttgtcctttccttcattacaagaaacatcccgctgagagcgggatgtttttattatatgcttttcatgctgccgccgtcggctgacacttgctgtccggtaatataggaggcttcttcagaggcaagaaaggcagccagcgccgcggtttcttccgcagttccgacacgcttcatcgggacgcctgaggcaatccgttcctccgcttccgctttagaaatgccgttttgcttcatgacattctttacgaattggtgataacggtctgtggcgataaatccgggattcagacagttgacagtaatgtgaaaaggcgcaagctgaatggcgatgtttttgctggcattaattaaagcggcgttcatcatgctgttggtaaacatattggcgccgggttctttccataggtttccgacgatattaatgattctgccgaattcgtgctgtttcatgatcgctgcggccgttttcatagagtcgatataggcgatcgttttattcgtaaaggtatttgtcatatcctctatatcgcagctttcaaaggtatccggcgagccgcccggaatgttgttgatcaatacatcaagccgtccgcattgtgatctgatctcttcaaaaatgccggctctcgccttctggtccgacatatcgccggccagaacggtgacgcccgcatccggatgtttggcgaggatctcttcttttaccgattcgatattttcgggaactcgtgaattaatgacggtatgaaagccattgtccgccagtttcagagcgatcgctttgccgatcccctggctggctcccataataaatgcggttcgttttgacaactgtctgcacccctttaccaaaatggaatctcctttacatcgtaaaaaaaaatgataaaaatagcaaattttatttaaattctgacaaagaaaaaacccgccggacaggcgggtgggtgttacacgtgcaaaaacttcggaagcgtgtcaagagacaagcggtttccgacaaaaaatgaaccgaattctccgtagcgcgcgctgacttcatcaaagcgcatttcataaacaagttttttgaactgaagcacatcatcgctgaagagcgtgacgccccattcgtaatcgtcaaaaccgacagaccccgtgataatctgtttgactttgccggcatagctccgtccgatcaagccgtggcttctcatcaggtttctgcgttcatccatagaaagcatgtaccagttgtcgttgccgcttcttcttttatccatcggatagaagcagacgtatttcgcttccggcagctcaggatacaggcgtgcgcggacatgcgggttttcatacggatcgccttctccgcttgcgaggtagttgctcagctcaaccacggacacgtaagagtaagccgggatcgtaaattcagcaagctttgatttgttaaattcaagctcgatttcgttcagctcttccattgtcgggcgaagaatcatcagcatgaaatcagctttctgtccgacgatgctgtagatggtttgcgagcctttgccttctttttgggcgacgccccatttttcaagcagtcccgtaaattcgtgaataatcgacaggcgctcatcgctggataacatcttccatgacgtccagtccattgtgcggaaatcgtgaagcgcgtaccagccgtcaagtgtttgggcggcttcgttcgttttttgctgctcactcatgtatcttcactcctatatcttttcattacattgatgccttcactatatcacagtttaaccgtttcggctgtggagaaaccttgaataatccgaagccttgtgtcagaaactaagccgtgaaacaaaccgtcaattaaattagttagaaaaataagatttctttttgaaagcgctataatagaagttggttatttgaatttagctggaagaagagtatgctgtaaaagtaagcgttttttgtcaacatagaggagggaatatcgtggcagatttatttacaaaagtacaagaaaaagtcgcaggaaaagatgtgaaaatcgtatttcctgaagggttggacgaacgtatcctggttgcggtcaacaacttggcgggcaacaaggtattaaagccgatcgtagtcggcaataaagaagacattcaagcaaaagcgaaagaattaaatcttacgcttgacggcgtggacatttttgacccgcatacatatgaaggcatggaagaactcgttcaggctttcgtagaacgccgcaaaggcaaagcgacggaagaacaggcccgcaaagctttgctggacgaaaactatttcggcacgatgcttgtgtacaaaggtctcgcggacggacttgtcagcggagccgcacattctacagccgatacggtgcgccctgcactgcaaatcatcaaaacaaaagaaggcgtgaaaaaaacatcaggcgtcttcatcatggcccgcggtgacgagcagtatgtgttcgctgattgcgcgatcaacattgctcctgacagccaggaccttgccgaaatcgccattgaaagcgccaatacggctcaaatgtttgacattgacccgcgcgttgccatgctcagcttctctacaaaaggatcggcgaaatcagacgagacggacaaagtggctgaagccgtgaaaattgcgaaggaaaaagcgcctgagcttacgcttgacggcgaattccaattcgacgctgcatttgtgccgtctgtcgcggagaaaaaagcgccggactccgacattaaaggagacgcgaatgtatttgtattcccaagccttgaagcaggaaacatcggctacaaaatcgctcagcgcttaggcggctttgaagcggtcggaccgattctgcaaggattgaatatgcctgtaaacgatctttccagaggatgtaatgcggaagacgtctacaatcttgcgttaattacggctgctcaagcgctgtaatccgcaaaagccggtctttacgaggaccggctttttttatagaaagaatgtcactgcggcccagccgaacagggacaaacagagagaaccgatcaagcctgctgcgagcgcccgccagccgctatgacgaaacgccgatatatggactttcaaaccgagacccgccatcgccatgccgattaaaacataagacacttgaacaagaaacgcggaaaacgaagctgaaataacgcctgatgtatggatggcgctcattccgagaaatccgaagataaaccaagggatggggagcgaagcggcagaagccgtctttgactttccgctgcggcgcgcccgcattccgagcatgaatgcggccgggacgagcagcgcgacccgggtcagtttgacgatcaccgccatctcgacggctgcttttcctccggcgctgccggccgccgccgcatgcgccacttcgtgaagcgttgccccgcaaaaggccccgtaagccgcaggagaaaaccccaatccatgataagcaagagaatatacaacagtaaaaacggttcctaataacgaaacggcggccgcgctgatggcggctgcattttcatttgatctgatctgcggcgcgatcgcggcaatggcagccgccccgcagatcgctgtgccgcaggctgtcagcgtgctgagtgtctgatctatacggaacagccgggacagtccgtatacaacggcacccgcaaacatcatacagcagacggcaattgcaaatacgtgccagcccgcatgatagatatccgccagattcagtctcatgccaagcaggatgatgcctgctttcagcaagtatttgcttgagaacgcgatccccggctctaatgccgcccgctgtccgaatacggcgcgccagagcatgccgatcagcatggcaaggacaagcattccgagcatatgcaaaaacggcaggcggctgacatagaaagccgcaaacgcaattcctgcggtaactgaaataccctttatcatcttcatctcagtcacttcccattatcttgataactccactttactgcggtcttaatcattagtaaaatatatttatatgatctaaacgattaggaaaaataatgattaggggcgatgctttttgtattacggggaactgaaaacattcattgccgtcgtggaagaaaaaaactttacaaaggcggcgcagaagctgatgatttctcagccaagcgtcagccttcacattaaaaacctggagaaagaatttcaaaccgctttgctgaaccgctctccgaagcactttacgacgacgccgacgggggacattctctatcagcgcgccaagcagatggtctttttgtacgaacaggcgaaatctgaaatttacgcccaccatcattatgtcaaagggaagctcaaaatcgccgcgagctttaccatcggcgaatatattctgccgccgcttctcgcaaagcttcatgacgagtatcccgagctgaacctggacgtcatgatcggaaacacggaggaggtcagcgaagcggttcggatgcttcaagccgatatcggattaattgaagggcatacggggaaaaacgagctcgacattcagccgtttatggaggatgaattgtgcattgccgcaccgaacggacacccgctcgccggcagaaaaaacatcccggctgccgaattgcaaaatcaagcgtgggtgacaagggagaagggttcgggaacgagggaatatttagaccacgtccttcaatcaaacggactgcggccgaaatccatgatgacgatcagcagcaaccagggtgtcaaggaagccgtgatcagcggaatgggtctttccgttctgtcaaaaagcgtgctgcaaaaggatctgcttcacggcagcatttccgtgcttgagataaaaggattctccttaaaacggaaactgtctatcatccaatcttccattatggagaacacaaaaaacaaagaaatcttcatcgctcttttgaaaagccaatttcaatcatctcaagcggagtgatataataaacgcatggaaagcttatgacgaaagggatttaatatagatgggaaagcaaccgattgatttactgatgcagccgagctggagaatcattgaccaatccagccttggcccttattttgatgcgaagcagtcattcgcaatggatgatacgctgtgcgcctccgtaggcaaaggggaatcgcctgcgacggcacgcacttgggtgcaccaccggacgatcgtgctcggcattcaggacacacgcctgccgtttttagaggacggcgtgaaattgctggagggcgaaggctaccgtgtcattgtccgcaattccgggggcctcgcggtcgttctcgatgaaggcgtattgaatatttctcttatttttgaagatgagaaaaaaggcatcgacattgacagaggctacgaggcgatgacagagctggtgcggcggatgctgtgtccgtacaatgccgaaattgaagcatatgaaattaaaggatcgtactgtccgggcagctatgatctcagcatcggcggccgaaaattcgcgggaatctcacaaagacgcctgcggggcggaaccgcggttcagatttacctctgtgccgataaaagcggaagcgaacgcgccgatctgatcagacgtttctatcaagccgctttaaaagacaaaagcaacgatacaaaaggcgtatatcccgatatccggcccgaaacgatggcttcattaagcgaattgctgcaaacggacattaccgtgcaggacttaatgctggcgcttttgactgaactgaaggaactcagcggacgcctgtatgcagccggattatcgccggaagaggaaatggtatttgaaaaaaatctgatccgaatgctggaacggaatgagaaggtgttcggcacgcaggaaagcttggactgagtccgggcttttttatttttggtaattatatactattcagttatagtgaaaaagaatcgttatatcaaaactagtttacattatataccttatttgattaatatatttatgtaggttccaaataattctataaactgaaggagatggagatatgaactttaaaaaaataaaagaagaaaaaagaatcacgatccctacacatttgttagccggagatgcggaacaatcaggcaattctttcgcttggagcggctgggtgcttgtagtgccgagccaagaagacaatcaaaacccgaatttgaatttctctgatttagccgctcaaaagtaagataatgactgtttggagcctacgcattcgagacgaggcggtgagagtgtgacacaagagtatataagagaaattaagcggggagcactgtcatggattgttgaaaatatccattattttgatatgaaacataaagtagcgaatgatttcagatggcgccttaaaacatttatagaactcatttttcttaccaattacctgatcagaaatcaggcagatgataaggaagttgctgttttaacggagtttattacagaaaggctccgtaatgatcagcttgaagaatttattcattttgatccggacggtctcgccggattggctattgcgggtgaatttcttaccttgactgatcatccgtcacaagcttcagtgatatgggagctggaaaaattcacggcagcgcgttttgattgcagccttgctaaaattccctttcgaaaaatggatctgaagtacagtctgcaaagagcaggcgtaacctcggaaataacggatttttctgacttatatcactacacagcagctggtcaggatatcccaaatacatatatgacggatcatgatgcatacagtatcactcatacgattttttatataacagacatgggatgttcttctcttacggataaagagtatcatctgtcgtccttaaaagaaaaggtcctgaaatttctcgggatctatatctgtcttgagaatttagatattaccagtgaattattgatgtgcagctcttttttacatatcgacatggataaggacaaccataaaccgctctatgaagcagcctggaataaaatctatcggggccaaatgaaagaggggaatgtcccgagcatcacctatcaacataaacccggtttgaaaggtgaacagcgaagagaagatgtgtttaaacattgctatcatacaacacttgtcgccgcgggtgccgcgcatgcctgccttagagcagaaaggaacgattaacttgaacagattagctgaagagacggatcaatttttattatcttttgctgaacaatcgcttccggatcaaaagagcattcagctgtttgccggcttctgcaaatactacagaaagacgagccattcttccgctgtaaaagaacatactgaaaggattgcctccgctttcgttgataagtcatgctgggaagatctgtttcactgtaacacggccattgtcaatgagttgattcatatctatttaacggcaaaagcttataaaaagaagcagggaatggattcggatgatcaagtcatacgtcacggattgcaaaacggctatcttataaaaaaagaatggccttattttaaatacgccgaattcgccggtttgctgaacgagctgggaatgtcaactgaccatgaaaaagtgcgcttttacaagaattcgatatttcagcctttgctccatgacgcatggaaaagaacagctgaaaacgagctggagtttgtcgagtactgtcttcttcatttagatcagggagagcatctgcttcatcccggcttgaaggcgtccattcaaaaatggcttgtgttttgtctcggcagccgaaaaatgaaacagctgtgcaatatgttatttatccaatcgtgtatcgatccatttttttatggctgtcaagcggctcttcatcatataaataacgagaatccatccattcattgtgctccggctcttctgccggcgattgagattctgaatctggagtgtggaacatgcggatagtcaaggaacattttaatataaaaaaaacagaagaatggctgctgggtttttggaagaacattcagctgcagccggaagaaatggaagcagatgatctcatgcacctgttttgcggtttagcggcatgtcatcactttgaaaaaagaaaggatacagaagaagtcattctattcttagaccgttattttggagaaaaaacgcacgaatgccatccggtcctgttcgcgtatgcgtatcatatataccgcaggatgaatgccgcaaaaagcatcttttttcataacggacttgaacaaatggtccgcggtttacaagaggaactgaaatcagagccttcctctatgatcctcatggtgttagcagcttattttggggcggtgaccccggaagaactgatcgttttcttagaaaccgcaatgaaacgtgaggccgatttgctcatggcaccgggcagcatccaggaagagcaggcagatgccctttatgccgtctcttatttgcaaatgaaaaaattgcagccttttctcacggaatggtacaaaacatcagactttgctttttcaggtttaatgttagccgagtgcagaaagtatcacattgacgccgttgcaaaatacacagccattatgaaatttctccgattcgatgaggcgctttttatacgggaagggcgggaatttctacgctttcagcagcgaagcagcggaagcttcggttatttaaatccattagcgatggaccaaggggcggtcagcggcaaattgctggaccgtcaatatttcctgccgtccgctcattatgccgccgcctctctgtctatgctgtaatgtctctcttttgaaagacggaaaaagaaatcaataaacaaataagaaagtagatcgctataaccgtcacggaataggggatgtttaacgttgaaatcgcatcacccgcacttttatttacataagcaacgaggtttaaatgcggaaagagtgtaaatttataccatgtaaattgggcaagcaaatcagttccgcccaatatactgccggcaaacagcagtaaaatggataagcaaagggagagcgcctggcttttgcacaatactgacaaagtgaacgcaatggtgacaatacttataattgatatgaaacgcaaaagcagaatgattccggatgctttgattgaactgatggtatacagactgtcatttaaatgagtatagacgagcggatatgaagcattggaaaaaccgaataacacgccgccgatcagcaaacagctcacacagtaaaataagtaaaccatgccggtaaacagaagagaggccagaaatttcgatgttaaaatccgccatcttcggttcgggcttgtagcgataaacttaatcgtcccaagggcaaactctttagaaacaaccccgctgacggttaaaatcgcagtcaagcttacgaaaatctcaagcccgtttgaagtaaccgtgccgaaaaacctccagccgttccattcataagggttgatgttatgctccaaataatagtctttattcttaacatcagcagaataataaacgcctgccgtttcagccggtttattaatttcttcctgttttttttcggcgagaagccgttctttccaattgttatccgaggaagcatctaactcatgattcataataaggccggccagcaaaacgatgagaaacaggaaaaaaagagataaaagtgtgcctttttttcgggttatttttatgaattcgttctgcgtcagatgaaatatgctcataccgcgtcctcctgatctgtaatcatcatgtatttctcttccaatgacaaagtccttgcagaaacgcgggaaatcagaatctctttctctgccaaagttttaatgatatacgggatggtatcttcctccgcttccaattcaatgatgcggctgtctttttgctgtacttgaagaataccgtcctgctctaatatttctttcgcccttgccggatgatcgaccgtgacggtaaacagctttttctgaccaaggtcatttctgctcttcatgtcttcaattcctaaaatccgtccctttttaatgtaggcaaccctgtcgcaaatctcctccatttctgacaataaatggcttgataataaaatggaaaccccttgcttcgctaaatcggaaagaatgatgcgcaattctttcatacctttaggatcgagaccgttcatcggttcatccagaattaataacccgggattgtgaagaagagaataagcgagccccaagcgctgtttcatgcctaatgagaaatgtttcacttttttgcgggcagcctgctccagtccgacttttgcaagggtattcataaggtcatccgttcgcagcgaggtgctgcgcagtttagtaaaatattttaggttttgcaaagcggtcatattcggatacatatccgggccttcaatgataaccccgatatgtctcataaaatattcaaagtcgctgtccggtctgcctctgaatgaaatggctccttctgtttttttaataagctgtacgatcattctgaaaatagtggttttacctgagccgttcggccctaaaaggccgaatatctcgccttttctcacatcgaaagaaattgactgtacaataggggtatgattgatggttttagagacatcttttaatatcagggctggttcactcatgctacttgcacaccttccttatgatttagggtaaaagccgtcaaaaccgaagaacatgcttccgatcaggccggcagcgattaaaatgagagcaatgctataccacatttttcgattcaatggtttccctccttacaatgctgacattccatttgaaatagcgcaaaaagatgcggaatatcagtttcgaaagatcaaatccggccataaacaccgccatacccgctccgaggaccatacatccgttaaaaatggctgttacaatcggcacttttatgaggagaaagaatgatccggtcatcagcatcaggccgattgccatcaaacttaacaccgcaacagaggcaaaaagaaacggtgtcagcataaacatgaagttgaacatgcccatacccagcatcaggccgaatgctttgaaaaaggagcgccatgttttctgctcctcggcatcactgatgaaaatatccgcttttaaggcgcgcgcaagtgttttggggtttcctaaattgccggcgatttgttcatcgctttttccttcagcgacgcccatttggaatatttcgccgatatcggcgagtatctctttttgctcaaattccggcagatcttttatttcccgccggagatgttttaaatattggtctttacacattcattttccctccttaatgatgctgttcactttttcggacaggtcaagccattccgattttaatgtgtgatgataaaaggcgccttcttctgttactttgtaatatttgcgtgacgggccttgatctgaagctgctgtatacgtttttaaatagttatttttcgtaagtcttcgtaatatggggtagatggtgccctccgatacagggaacgtttcacttatgaccttgattaattcataaccatataaatcttcataaagaagcagggacaacacacaaagttccaatgctccttttcgtaattggctactcatttactatcattcccatcatatctaataattgtattctctatacagtgtattgcacagtagctaatcgatcaataattcccaagaaccatttgggatgaggaattgaatctttatgcttatgtgcgggcggggaccgagatgcgcagcccttgcgggaagaaggcctcctgaacaatgtttacattaatatagatcaggatgcgcgtcattgacaaatggcaaaaacccctttttccatgacaagaaaaggggttttttgcgttattcggccattttttctaaattgccgttccggtccattttaaaggacggagacgcatgctcgtcgtcttcaaataaaactagttttctggctctgttcataattttcaccaaggtttcgtagtcttcctgaatggttttttgatctttttcaagtttttcgacggccgcttccagctgctcggttttagactgaagttcttggttttcccgttttaaacggtcattttccatctgcagggcggaagtttgctttccgctgccttcatagctctgcagaaattgaatgacgtctgccattgtgagctccgccttttggctcggctgctgaggcgccagcaaatgtgataaactagctaactcttccttgaagctttcatcgacataaggcatatgttcgccggacatgacggcttgccgatcctcttttggcgcttccgtttgaaccgtctcttcggctgcggtttcttgaatgatgtccgcatccggtgcaggcggctggtataatagtttcttcttggccggctggccgtttccgagcgcgcgcatccgctgtttccgctgtttttttgcaagctgaagcgctttttcatattgatggcgcacgacggcattccatctgaatccgcacgctgccgacgttctgtttaatttatcgcctacctcttcaaaggcgttcagctgcgtgcttccttcccggacgtgccggagcacggtttccgcaagcagcaggtcattttcctccgaccaggcgtcctgtctttgctttgtcaatgttctcaacccccaataatctttgatggtattagaatgtccagattggaaaatatttatacaaattggctgaaagaatgagagatacgcagagccttgcaggataagatgaatccttgtacaataaaacgtgatgtgatttttttcgtttttaaaatttaagatttaacatagaggaacattgaatgaagggaagcgtacatcatggctaatgaattccgagtgtgtgatgattgccaggccaccaatattaagacattgctgccgcgtttgaaagaagctgacccggatgcaaaagtggaggtcggatgtcagtcatattgcgggcccggacgcaagaaatcgtttgctttcgtaaacaaccgcccgctgtcggcgccgactgaggacgagctgattgagaaagtgaaaaagaagatcaaaaagtaaatgtgcatttttacgacagcctcgcccgatgggtcaggcttttttgcttcaaaaaatcaatgattgaaaactggaacaaaacgccggacaaattcaaggatgttttcaaattacagagccgatataatagaatcacggctaaaaaaaagagggaatgacgatggcgtatccaaacggaaaattatcagaagaaaaagtgtttaaagatcccgttcaccgctatgttcatgtgcgggacaagctgatctgggatttgatcggcacccgtgaatttcagcggctgcgccggatcaaacagctcggtacgacgtatttgacgtttcacggcgcggaacacagccgttttaaccattctctcggcgtctatgagattgtcagacgaatggttgatgatgtttttaaagggcgtcctgaatgggatgacaatgaacgcgaactctgtctcagcgccgcgcttttgcacgatttgggacatgggccgttttcgcattcctttgaaaaggtttttcatctggatcatgaagactatacgagggaaatcattctcggcgacaccgaggtgaatcaggttctcagaaaggcgggaccgggatttccgcaggatgttgccgaagtcattgccaaaacatacaaaaacaaacaggtggtcagcctgatttcgagccagattgacgccgacaggatggattaccttcagcgggacgcatactatacgggcgtcagctacggacattttgatatggaacggattttaagggtcatgcgtccgcgagaggaccagatcgtcattaagcaaagcggcatgcacgccgtcgaagactatattatgagccgctatcaaatgtactggcaggtgtattttcatcccgtgacgagaagcgctgaagtcattttgacgaaaattctccaccgtgcgaagcagctccatgaagaagggtatatattcactcatgctcccgttcatttttattccatttttgaagggaagctgacgcttgcggattatctgaagcttgatgaagccatcattttatattatttccaggcttgggaggaagaagaggacccgattctgtccgacttgtgccgccgcttcattaaccgccagctgtttcaatatgccgaatttaatccgaatgaggaaatgtcggcttattttgaactgaccgctctctttaaagaggcgggaattgatcccaattactatttagtggtcgattcttcatcggatctgccgtatgatttttaccggccgggtgaagaggaggagcgtctgccgattcatctgttaacgcagaacggccagatcaaagagctgtccaggcagtccgccattgtcgaatccatttcgggcaaacgccggacggaccataagctctactatccgatggacctcatttgcgacgattcagaaaaccctgaagcaaaattaaaaatccggcagctgctgggactgacatagaaggattttggtaaagaaggaaaaggagatgtcgggaatttgttgaaagaacatgcaaaactgatgaaggtgttctcggattctggagaaatcatcgggcggaaaaagctgcagaaaatcatttatatcgcgaagaaaatgcagtatcctttctacgaaaaatatgattttcatttttacggcccgtattccgaagaactgacgcttcgaattgaagagctgtgcaatcttgggtttctggatgaggtgaaggaaaaaaagggcggctactttcaataccggtactcgctgacggagacgggagccgagtttttacatcatgcggagcttaagatgccggatatgaagaagtacatcgacagcgtcaacagccgctcatcccggtttctggagctggtgtctacgattttgtattttgacggccttgaagctgaggaaaagaaagagaaagtgtttacgataaaaagcaaacagaaatatacggatgaagaatatgatgaggcgcttcactacatagaagagctgaaacacatttgttaaaggcgatgctttcgtctttttttatgaaaaaaccaggccgcgatgaagcgggcctggttttgtttattgtctcaatttgctgtgcttgtacgaatataaaaagtaaacgatgacgccgatgatcagccagacggcaaaataaagccacgttttcagcggcagattgaccattaaaaacaaacagcagataatggccaaaatcggcagtacgggtacaaaaggcactttaaatccccgtggcagatccttatgggtgcggcgcagaatcagtacggacagactgaccatggcaaatgtcaatagcgcgccgatgtttgagagatccgacagctctttcagatcaacaaaacccgcgatgcatgcgctgatcagtccgatcagccacgtattaaagatcggcgctcccgatttctttccgacaatggtaaagactttcggcagcattccgtctcttgccatcgcaaaagatatacgggtcgccgcataggtatgagcaagaacgacggccatcagtccgatcaccgcaccggcagcgataatgcccgccaccgcgttttgtccgacagtctgcagcacataagacatggcttccggcacattaagctgtgaatacggaaccatacccgtcatgacgagacagacgatgacgtataccaatgtacagatcaccagtgaaccgataataccgatcggcaggttgcgctgcggttttttgacttcttcagccgaagccgaaatcgcgtcaaacccgagaaacgcaaaaaagacggcagaagcccccgtaatgacgcctttaattccaaaaggcataaaaggatgccaattgcccggctttacaaaaaagcttcctgtgatgataaacagcaaaacaattccgatttttacgagaaccattatattattaaaggttttgctctctttagagccgcgtgacagaacgacggcaattaatagagtaatgatgatggcaggaaggttgacgatccccccctggctcggcacgtgcagcagactgtccggcaaaggcatgccgatttcggctaacagattattaaaataacttgaccagccgcttgccaccgctgacgccgtcaccatataaacggataagagcgtccagcccattaaatggccgacaatttctcccatggtggtataagagtaaatataggcgcttccgtaaaccgggagaacagaagcgatttcggcgtaacataatgctgcaaggctgcagacaacggctgcaatgataaaagaaaagattacggaaggcccggcgtttttcgcggctgtaatgcctgtaagaaccatgacgcccgtcccgatgacggcgccgatgcccagtaatgttaaatcaaatccacccatcgttttggcagtctgcctttttctgctttgttcaagcagctgggtgatgtcttttttttgtaggatattccgcaacacgcatccctccatccaaaagcaaaagccaagagggactctttggcttttacccgtgtcacatcttctgtgtaatcgacaatcctgtgttctgtttccccgtctgttccgtttcttttcttttccaatcatattgtctgccgcatccgatcagattatccttaccgtcaaacgcagtcacccttaatgattttacctgaatcgtgtctataaaaccagcattgcataaaaggatatggtaaaaaagagggagacaaaagtctgtgcagggcaggataaaagttgcgggcattccggccggaattttgactttctccgtaaggtatcagtaaaatgtaataaaaaacaaacaaatgatgatggatgcatcttgaaatggggagtttctgcatgaagcacgataacttgcaagcaaatgtactggattacgcgctcacgaaatatttaaagagcacgaaaaagcttgatgaggcgacaattccaaagagtataaacaatatcagaggatttattctgaggattatttaccggcacggcacgtgcacgattaaagatatattgcaggaggtcacattatcgccttccgccacgacaaccgctctcaatcatttagaaaaagaaggattcgtggaaaggtcgagaaacaatgaagaccgccgcacggtatggatgacgctttccgaatcgggaaaaatggcggccatgcaaatgattgaaaaccggcagctgctcattgacgaactgttcgaagcattgacagaggaagaaaagaaaatctttttcagcctggttgaaaaggttgtgaaataagccggcctgacatagcagcgccggccattatcaaggattactccgtatcgctgatccgtttgccggcgacggcgtaatgatcctttctcatttcttcaatcatgacaatgatcttttcttcggctgcgccagtcgtttcttttacggcttcggtcactttttcaaccagattccgtttttgttcatctgtgcggccttcaagcattttaacggttacgagcggcatggtgctgatcctcctttatcgtttcctctctttggaagagagatcacttatagtatactgaatgaaggacaatcttgcatttttaaaaaaaggggattttgacatttggacagatttttatattatccgctggagcttatgccctatgtcgtgattacgctgatcgtggcatttacgatgcatgaactggcgcacgcgtatgtcgcgtatcggttcggagacgataccgcggcgagacagggcagattaacgctcaatccgattaaacatcttgatgttttcggaacgattctaattttggtcgcgggtttcggctgggcccgtccggtgccggtgaaccgccgcgcctttaaaagaccgcggctggcgggagtgctagtttccgtcgccgggcccgtaagcaacctgcttcttgcctttatcggtttctttttgctagtgttgatgcatgcttacggaatggagctgctttctgcattcagcatggggcttgaccgctttttctctatttggattcagctgaatctcgcgctgtgtttattcaacctgctgccgcttcctccgcttgacggctaccggattattgaggatctcgtgccgccgcgggtgcgcgccaaaatgactcagtttgagagctacgggattatcgtgtttctcgtgctgtttgtgacaccggtcggctcctatgtcgtgtggccgctgttaagcgaggggagagactggattctcaaggtatttgccattatatttcaaccgcttttgtaggagggtattttcatggaagaaaaaaagaagaaaacaatcggatttaatattattaaaagtgatccgaccgacggacatggcggttttggcgccgggtcgctgagccttgacaatatttctccggtatttgtcgatgtggaagagaaggaagctttcgtagacatcggcgcaatgcatgcccgcagtgtcgttgaaaaaggcatcaaattcctgccgaacaaagatgaagtgccgaacggaaaaccgtactggctcgtgtgggtcaccatcgacagaaaaaaagaaggcccttattacgcgggtgtgacggcttgtgaaatgaccgtggacagaagtatccgcagaggctataagtcattgccggagcatgtgaatttaatggataaatcaatgaagcgccgcattatcgtggacaaaatggacgccagctcaaagcaggtgcttgctgaatttctgcagaagcatgaccaagggctctgggaacgttcatccgatgaattgaaaacaggtctgcttccgggcgaaaaataatttgtgaactttttgtgaactttataaatatttgcactatttcgcaattgtactgagtaaactgttgatacagaatcaggacatggaaagtcccgagccgaaccaagactcggggtttttcatgtttacgcggaggtttcatcatgttcaccgtctttgacatcgggccttggatcattgaagcagatacggcggaaacgagaaaacaatatgaaaaatcatgggctgatccctgcgattgcgggagctgccggaacttttccgaggcggtgaatctccttcccgccgagaaaacaagattgtttacgcagtttgggattcgtccggctgtctgtcacgatttgggggagcatggaaaggaaaacggcctgcatcattatgcgggcagctatccgattgtcggcatgcttagggaaggctggccgaagtttcacattgagagagcgggagatatccgcttttcgttttctttgcctagtacaacattttttataccgaagggttttcctgaccctattatccatctcgacttttcactcttgctcccatgggtgcttgaggaagacgcggattaagcccggcgcgcaatgcaccgggctcagtcttttttgccgagccacttatcccaccactttttgcgcggagcttctttacgggcggggacgtgttccttttcttttttagacggttccggtccgtagcacacatccgcgggctcagtgcctgcgatgaaatacgtgtaatgctttgcggcgcatccgggtcccgaagtgtagccggaagcggggtcaatatagacgcccgtgacgcccttcggcggtttaagcgctatttccggttctccttcgagcgccttctccataaagtccgcccaaatcgtcttcgcatagcttttttcttctactgaatcaatcgtgctgcttttgtcatagcctgtccacacaccggcggcaagagcccgattaaagccgatcatccagctgtctgcgctggtcgtgcctgatttcccgccgtacgtccgggtcagccggtctgaaatggtgcgtcccgtgacggaagtatagccgtttaaatcctcatcaaacatgcccgtcatcatgctcgccgtcacaaaagcggcttttttatcaagcgtctgctgatgtccgcgcggctgttcatacaagaccttgccggcggtatccgtcacttttgtgataaaggaaggggtgatttgttttcccccgtttgcgagcatcgcataggcattaaccatctcaatcgggcgcacgggttcagttccgagcgccagagacggaaggggctttaaatgttcgctgatgccgaattcctttgccgccgacacgagcttattcatgccgagaaagagatgggtcttcacggcataaatgttgtctgataacgcaagcgcctgaagcagcgtaatcggtttattggcgtagtagccgttgtaattgcttggagaataggtatctccgttgtcgtcaatctggaactctgtggcttcgcttttcatcagcgtgaccggtgtaaagccgctttgaatcgctttgtaatacaaaagcggcttgatcgtggaagccggctgccgtttcgcctgtgtcgcccggtcaaacgggcttttttcgtagtcacgtccgccgagaagcgcaagcacgcgccctgttgccggatcaatcgcggaaaagccgacctgaatgtcagagccggtacggatcgtatgtgccacagtgttttccgcgatccgctgcatgcgcttatcaagcgttgtataaacacgcaatccgctcgttgcgagctgttcgcgcgtcatgccgagctttttctcgagttctttcatcgcatcatcgtaaaaataaggcgccgttttcgccgcggttctgcttttcagcggctgataggcaagcggcgttttcttaatcctttccgccttttcttttgagatcattttttgtccggccatcagacggagaatggtttcctggcgctgtttggccttcttttcactgacatatggcgaatagccggacgggcctttcggtatgcccgccagaagcacggcttccgcatcgttcagatctttggcgtgtttgccgaaatacaggcgggaggcggcttcaattccgtatgcgccgtggccgtaatatatcgtatttacataaccttctaaaatctcgtttttggaatagttctgttcaaggcggatcgtgtaaaatgcttcgttccattttcgtttccatgttttatcatgctcaaggtagagatttctcgcgtattgctgggtgatggtgctggcgccctgaaccttggccattgcctttatgtcagccagcgcggcggcggccatccgccggtaatcaaaaccgtggtgattgtaaaagttttgatcctccaccgcaatcgcggcctgcaccgctgtcggattgatatcttttaaccgaacccagtagcgcttttccccgaaatcggtctcacctagctttgagccgtcatttgcataaagaatcgtagactgaggaacccggacggagggggcgccctgccatttcgctgcaagaagaacggatgtgaagcagacgccggccagcattccgccgatcagtgtcagaaagatgcaggcgcggatgattttgaacgtgattctgagctgttttccagatactttatccacttttgggaaccccctttttcatgattctattattatgtgaaaaaagggggttttttaaacatatcaaaccggacacttctttactttttcccctccatcctctatactttttccttaggtgaaaatgagattttaaccggaataaaagcgatacagacgcttacaataaatgaaataagccttgaaagggagatgacaattgagcgagctttggtatacggagaagcagacgaagaatttcggcattacattaaaggtgaaacaaacattacatacggaacagacggaatttcagcatctggaaatggtggagacagaagaattcggcaacatgctgttcttagacggaatggtcatgacatctgaaaaagacgaattcgtctatcatgaaatggttgcgcacgtcccgttatttacgcacccgaatccggaaaacgttctcgttgtcggcggcggagacggcggtgtcatcagagagattctgaagcacccaagcgtaaaaaaagcgacgcttgtcgacattgacggcaaggttattgaatactctaaaaaattccttccgtccattgcgggcaagcttgatgatccgcgcgtcgacgtgagagtcgatgacggtttcatgcacatcgcgaaatcagaaaatgagtatgacgtcatcatggttgattcaacagaaccggtcggaccggccgtcaatctgttctcaaaaggcttctatgccggaatttccaaggcgttaaaagaagacggcatcttcgtcgcgcagacggacaacccgtggtttacaccggaactgattacaaacgtacagcgtgacgtgaaagaaatcttcccgatcacccgtctgtatacggctaatatcccgacgtacccgagcggcctgtggacatttacgatcggttctaaaaagtacgatccgcttgaagtagaggacagccgtttcttcgacatcgacacgaagtattacacgaaagagcttcacaaagcggcatttgttcttccgaaatttgtgagcgacttaatcaaataaaaacgtacggcgcaggagcgaatcttgcgcttttttacaggaaagcgagggaattattgatgagatttgatgaagcatattcaggaaaagtatttatcgcgagccgccccgactggaaagaggcggacgccatcctttacggcatgccgatggattggacggtcagctaccgtcccggttcacgattcggcccggggagaatccgcgaggtgtctatcggtcttgaagaatacagcccgtacctcgaccgtgacttggctgatttgaatttctttgacgccggagacattccgcttccgttcggcaatccgcaaagaagccttgatatgattgaagaatacgtggacggcatcctagaaaaaggcaagttcccgctcggcatgggaggggagcaccttgtatcatggcctgtcataaaagccatgtataagaagtttccggatcttgccatcattcattttgacgcgcacaccgacctgcgcacggattatgaaggcgaaccgctttcccactctactccgatccgcaaagcggccgagctcatcgggccgcaaaacgtattttcattcggcatccgctccggaatgaaggaagaatttgaatgggcgaaagaaaacggcatgcacatttctaagtttgaagtgcttgagccgctgaaaaaagtgctgccgcagcttgcgggacgcccggtttatgtcacgatcgatatcgacgttcttgaccccgctcatgcgccgggaacgggcacggttgacgcgggaggcatcacgtctaaagaattgctcgcgtccatccatgaaatcgcgcgctcagaggtcagcgtaaaaggcgccgacctcgtagaagtggcaccggtctatgaccactcagaacaaaccgcaaacacggcaagcaagatgatccgtgaaatgctgcttgggtttgtgaaatagaaagaatttcccccgcttgaaacatggcgggggatttttatattgtatataaactacttagaagttagtaaaagaaatatattattttactattaataattgatgttattgataaaaattatataatagggtattatttagtaaatacatctttagaaaggaagttagaatgaaaacagcagtagaaaatgaattggaattaaaaaagattgaaatttcagtaattaaactgataattgctgaaaagcctaataaagagatcgctaagtcattaaactactcgcagcgtaatgtcgaatatatcatagccggtctttgtaaaaagtggaatgtaagtactagagtcggtattgtttcggaagcatataaaaggaattgtatacagtgaacgaaatgaaagaaaaacccctattgagggggtttatttatatatgctaaaaaaacattctatacaggaatgccgtaaaaataaaaactgagattgtcaggtagttcaaatttgttctccatttcagaagaataaacaaaagaaataagtatgcaatattgaacaaatcaaagatagaaaaaatcaaatgattacttgtgaaaaataaactagtgtttggatgttgtgcgaaaatatttttgaatgatataagaaaaaacttaatcgcgaccgggatgttagaaaacataaatagggaataaaaagttttgatcttaatctgagcgccaagaaaatttataatgagaaataatacgaatccttcaaaaatgaccccgaacattaaaagaaacagtgcggctattgcaatgatgtaatctaaatgttttacttgctcaacaacttgtatagggatgtttttgggaattaaacttttcataaaaggtaaaagggaacttaaataaaaagctaacccgataatataaaacaaaaacgaggacaaaaaattaatgtttcgttccttaaatgaagataattcaatttgcataatcctaagaggctccttttataaagataggtgtaataaatgtttctaacatagctgctatcattaaaccgagaaatataataccaatatatttaaaagtgaatttcaaatttattttgaggagtaataaatctaaagttaatttcattcctacagaggctgcaagaagcaataccggcacttcaattattccatggggtataacaagcagtaaaaggtttaaattgtctttaatgtttcctatcgcatttcctaaaattaatccattaataattaaaacagcaaccgtgccaagcgacagcgttaacgggcctaaaaaaacaagcagactcgctactttaatattattaaagaaaatctgaaaaaaatccggacggatatttcgatttagattatttacatttgaagcggaatctgtataaatatatgctgtaaataaagcaattaaaaataagatcagacagagtatgtacaatttgactaaaacattctttttaaacaatgtattttcatccattcgttaaagggactgccagggatattgaatttaatgttttatattatgctgctgctgtacttgctgcagccaattgttctaaaacggccaatggcaagcctgcaccaagagatcctaaaacagtaatgatagccagaactgatcccgttgcggtgatagcactgacaatccaactaggagcgataattccagctctgtttaaaatatcgataacatccatgcttaaatgattatgtttcatactgaaaagagcgagaacaatgattcctgatgctactaatgtaaaaatcgctttactattttgtgtttttaaaagtagattcattttttcctccaattttttcaatatccccagcaagttaaataataaaatatattggaatctatttgaattgcggatttccgaaaaaataatagttaagaggtgaaatccgtaaaagtatctgctggcttatttcgtacaaagaaagccggaccatatgtatgatccggctttctttggtactgaaacattatacttttttttcaaaaataatatcaaaataatcagctgccccatagcctgaaatagcaggagcaaatatttgaaccagctttcacccttgctgcgaatacttttcaataatttatttatagtcttctttaggctttcctttccatcggtttacttctgcttttatgaacttgtattcgtacattgctgtataatcctccggaagtgtattggaatcgttaccttgtttttcgattttgataaacttgaatccataaatagagcgcgcagcctattaaaagaatcggaaattgccatcctgtatttccgtttttaaaataatctattaatgaccatatcagtaaagcgacagtataaaaactaaatgctattctggcggctgtacccgattggtgtttttgcatctcatccattttcttcataagaaccgctcccttaattttttttggcgttatagttgaatactttatctattcccgtatttaaagcgtgagctatcgaaaaagccagacttaaagtcgggtcatatttattattttcaattgcattgatggtttgcctggtcacattgcagagcttagccagatcattttgtgaaatatcagctgctgttctaagtttttttatattgttatccactaaaaccctccttaacttattttgttttttattttaaattttcaaatttatatatatttattttaaataatatatgtataagtgtcaaatactttttacacatttgagttctaaggtatgttttttgtttttgtaaattagttgtttatataaaaaacggcttgcagtttaacctgcaagcctaaaagtaattatcatttaaatcatagctctttgtgctacttcgaattggtgtgaaggtgtattcgtcatatctgctgttataaaaactgaggttacagctaagcaagtgagtaagaccttatacttcagcttcataaaaagttacccccccttgaatatgctgtcttgcttcttcaacttttaaaaagtatgttgaagcttttttataatcttcaagtttgtgataatatttagctgcatcaagagcaaaatcttctatatctgcatacatcatcttactttccaaaaagtcaaaactccttttcattgcatcctcatcaggtccgttcacatacaaagattttaaaaattcgaattcatgtaaataaactgaatctgctgactcttcggaatagataactccttttttatgatactcgagcgctttgtcgtatctttctaatttataatgaatctgtgtcattaaaaaatatgcttggggcaaagaaggggtcattttagcactttcaaaaacatcaatggctttttcaacataagttatagctgcttcatagtcgttcaggctttgtttgcaaagtgcgatgttatacagcgtcctgcccattaattgaggctgtttttctgtttctgccaaagaaaaagccttttgaaagtgagtaattgcccgatcatatagttttaaatccaggaaatttgctccgaataaggattggcattgtatgagcctgatatcgtatgacgactgagctttatatatttcatatgcctgccttgcgtaatcggtagatacatacgtttgtttcaaatagtagtagacttcagacatcttgaaaaagtactcggctttatcaatagtatccttaataaatgagagtttcgtctcagcctttttaaaaaattttatagccgacaaatattcccgctgatccagctcatacatcccccggaaaaaattaaaataataatcaagccgtccggtcagccgggcctgctttttatcaatatccgcgagcagatccgatagtctcggctgttcttctatccgctgcgattccagcggttcgaggtattcgagcatcagattgtggcggaattccatgagagaatagtacagatgaagatcctgatcttcttccaggcctgcaagctcttctttgatttctctccgcaagtactcggcgtccgggatgctgaaccttcgaatgtacatataccattcgttgattttttctccaaccgctgaagacgataaaacactcgccactattccgaatccctcccttccacgttatgtatatgacatattttatcattttcattcggaaggatagcgcaaaaataccgcaaacttttcccctttgacaaagccgtccgccgaaggaaccgcatttatcccgcagcctaggatttccggttttttcattttccttaaaaatcatgtttatcttcaaaaccaatcagcaaagatggtaagataggaggaagcggttgaactttttcccttgaaaacttatactattcaggttaagcgggatgatgaaaaggaagtgtcagcatgagacaggagacaccagtagccattcatgtgcaatcattcattcataacggctccgaagaagagtcggttgaatttacatcgagtggattctattacgtgagaaacggcaaaacgtatctttcctatcacgaagagcatgatttgggcaagattaaaacggtcgtcaagattacagaaaaagagattctcgtaatgagatcgggcgccatccaaatgaaacagcggttcattccgggggcatcgacactcactcaatataaactgccgttcggacaaatggagctccgtacggaaacgaaaaacattcaatctgatgtcggcggttcggaaggctccgtcaaactgacatataacatgactgtaggcgaaaaccaagaacatgtacataacatgacgatccaatataaggaggaaacaaaggcatgaatattgcggaacaaatgaaggacgtgctgaaggaagagatcaaagcggccgttctgaaagcgggcctggcggaagaaagccagattccaagcgtactgttagaaacgccgaaagacaaaacacacggtgattattccacaaacatggcgatgcagctggcgagaatcgcaaaaaaagcgccgcgccaaatcgctgaggagatcgtggcgtcatttgataaaggcaaagcttccattgaaaagatggatattgcggggcccggctttatcaacttttacatgaacaacagctacttaacaaaactgattccgtccgtgcttgaagcgggtgaacattacggagagacaaacatcggacaaggcgaaaagattcaggtcgaattcgtatcggccaacccgacgggagatcttcacttaggccatgcgcgcggcgcggcggtaggtgacgcgctgtgcagcgtgctttctaaagcgggctatgatgtgagccgtgaatactatattaatgatgcgggcaaccagattaacaacctggcgctttccgttgaagtccgttattttgaagcgctcggcctcgagaaaccgatgccggaagacggttaccgcggcgaggatattatagcaatcgggaaaaagcttgccgaagatttcggcgaccgtttcgtacatgaagaggagagcgaacgtcaggcgtttttccgtgaatacggcttaaagtacgagcttgataaacttcgctccgacctggaaaacttccgcgtgccgtttgacgtatggtattctgaaacgtcactgtacgaaaacggaaaaattgatcaggcgctcgaggcgcttcgcgaaaagggccatgtatacgaagaggacggcgcgacatggttccgctccacaacgttcggcgacgataaagaccgtgtgctgatcaaaaaagacggctcatacacttatctgctgccggatatcgcataccataaagacaaacttgaccgcggattcgacaagctcatcaatgtatggggcgcggatcaccacgggtatattccgcgtatgaaagcggcgattgaagcgctcggttacaagaaaggcacattggaagttgagatcattcagctcgttcatttatacaaaaacggcgaaaaaatgaagatgagcaaacgtacggggaaagccgtaacgatgcgcgacctgattgaagaagtcggcttggatgccgtgcgttatttcttcgcgatgcgcagcgctgatacgcatatggattttgacttggatcttgccgtatccacatctaatgaaaaccctgtgtattatgcgcaatacgcacatgcacgtatttgcagcatgcttcgccaaggggaggagcagggacttaaaccggcggcagatcttgatttcagccatattcaatcagaaaaagaatatgacctgctgaaaacaatcggcggcttccctgaagcagtggcagaagcggcagaaaaacgcattcctcaccgtgtcacaaactatatttatgatctggcttccgctctgcacagcttctacaatgcggagaaagtcatcgatccggaaaataaagagaagagccgcgcgcgtctcgctttaatgaaggcgacgcaaattacgctgaacaatgcgcttcagctgatcggcgtatccgctccggaaaaaatgtaatgatgatcaaaggacaaagtcttcgggctttgttcttttttttgcatataaagcgtgtgatgtaattcacaatccagcacactgagtttttgtatgataagactgatattgaatcagtgaaaggggcaagccgaatgatcaatcgtcaacatattcaattatcgctgcagtctttaagcttagtggcagggtttatggtgtgggtgctgatttcatcgctcatttctcaaatgacatcagatattcatttaagcaaaggcgagatttcattggtgacggcgattcccgttattctcggatcgcttctccgtattcctttaggatatttaacgaacaggtatggcgcgcggctgatgtttatgatcagcttcatcctgcttttgtttcccgtattttggatcagtatcgcggattctttatttgatttaatcacgggcggctttttcttagggatcggcggagcggtattctccatcggagtgacgtccctcccgaaatattatccgaaagaaaagcacggtgtcgtcaatgggatttacggtgccggaaacatcgggaccgccgttactacctttgcggcgccggttatcgctcaagccgcgggatggaaagcaaccgtgcagatgtatcttgttttgctggctgttttcgcattactgcacgttttgttcggcgaccggcatgagaagaaagtcaaagtttccataaagacacaaatgaaagccgtttaccgaaatcatgtgctgtggatgttgagcctgttttattttattacgttcggcgcctttgtcgcctttaccatctatcttccgaattttttggttgagcattttgggctgagccctgcggacgccggtctgcggacggccggctttattgcggtctctacgctgctcaggcctgtgggagggtttcttgcagataaactgagcccgctccgcattctgatgttcgttttcgcagggcttacgctgtcaggcgtcatgctgtcattctccccggcgatcggcctttatgcgttcggatcgctgacggtggcagtctgctcagggattggaaacgggacggtatttaaactggtgcctttctatttttcgaagcaagctgggattgccaacggtattgtgtctgccatgggcggactgggcggttttttccctccgctgattctggcaagtgtatttcaggcaacgggtcaatacgcgatcgggtttatggcgctttcagaggttgcgttagccagctttgtccttgtgatctggatgtattggcaggaaagaatgaaaacacatacggagagaaacagtcatagccttgattcataatgatccattcacaagattgttagttttttctgggtgagtgcaaatcaagtcacgttacaatatacatacgcaacgtgactttcttcgaggtgagctcatgaatattctctctgtccgaaaatctgataaagaacttctttcccgcgaactgcatgaattgctggaatcgatcagtacgaaaaggaaaatgaaaaaacacacgtatttgtttcaagaaggaatggatgcagaagagctttatctgattcaatcaggactcattgaaatcggcaagctgacatctgacggaaaagacctgacacttagaatctgccaaaaacacgatattgtcggagaattgacgctattcacagatgagccgagatatatgctcagtgcgaaagtgttagaggacggggaggtgctcgtcattaataaaaacaggctggaaaaggaattggtccaaaacggtgttttgacgtttgaatttatgaaatggatgagcacccatctgcgaaaaatccagtctaagatcagggatctgcttcttcacggcaaaaaaggggcgctctattccacccttatccgcttatcaaacagctacggggtggaacgaagcgacgggattctgattaacattgtgctgacaaatcaggatttggctaagttttgcgcggcggcaagggagagcgtcaaccgcatgctgggagacctccgcaaacaaggggttatttcgatagacgaaaccggaaaaattattttgcacaagcgggactatttacgatgcgagatcgagtgtgaaaattgtccgcttgagatctgcaatattgactgaaaaaacaagggcagccggtgtccttgtttttcagcttgtgatacatatacacatgacggcgaaaaagaagccggcatttacgatttccagaatgccgatcgttttcaccggccagtctcttccgtgaaaaaaccaggcccgcagactgcttgggataaaagcgagaaacgcccagcctgccccgagaagagccgataaaaaggggagcaagaggtgatatccccacgaccagtaagcaaaccttctgttttttctctcccgtatgaccgatttcacataaaaagaactcccgacaaaaaataaagcggattgcaagaatagaaaccaagcccagccgtcaaggattcccgttcccagccagcagctcgcaagcccgcctgaacaaaagaacaagactcccgcaatatcattcgtgagcgcccgttcgttttttcggcgggcataatgcgtatgtatgagaaacagcggcaataaaaaaacgccgatccagacgagctgcggcttatgaaagacagaaatgatcaaaaagcagcaggccggaaaaccgtaataccatatccacttttgataaggctgaagctgtttctttttcaaagcgagcgaaacgggataaaccgtcaagtaaaggaacagccagcccagaaagagcggaatatgccagaaaaccgggcctcccttgaccatgccgagtaaaaatggaatcagcagcatcgcccatgcgccgtgctgcttcggaatcatcgctttcatcgaaaccctcctttttatttcattataagtgcaaacactctcctgataagtgactttcatcatacaagctgtgaaatacatcactgccgcgcgggctcaatcgggctacactaaagctatcaatagcacaggaggctttcctatgaatcagtgtgactatttattatttctgaaacaacttcctatgtttaatgaagtgcctctgtccattgtcgaaaccttgctgaaaaacgggacgtttatccgcggctcatctgaccaatctccatcctttcttcattcacaatccgtttatattgtattaaaaggcaatatccgttttacggacagcaggctccctgaagggtcgcaaaccgttgcgctgtgggaaaaaggcgatgtgtttccgattgatgaaaaaggcgggctctctttatcgccttttatctcagtcaatgcctcaccggatattctggtactccatattccatattctatatttaagcaaatgatgtcttaccatccgcggctgcaaatgaactttttggcgatgcttcagcaaaatgtcttctgttcctatcagttgtttttgcggtatctgcatacatcactggatgaaaacgccgaacccggttcttaaacagaaccggtttttttgatgacgcgggcgtcctcatatcgtttaaaaatccttcctgctgctctgtgtgaacgttttgtgaaaaaagcagagtgtgtgacttagttcacaaggtgatgcgccgtctctgtttatagtgtacatagcatcacctgactcggaaggagtgaacgatcatgaagaaaaagaaaatgagtccgttgctcaggagattaaactatttttctcctatcgaacatcattcaaataaacatagccaaacgacaagcgaagatcgtgattgggagaatgtatacagaaacagatggcagtacgacaaagtcgttcgctccacccacggcgtcaactgcacgggttcttgcagctggaatatttatgtgaaaaacggaattgtcacgtgggaaggacaaaacttgaattatccatcaacaggaccggatatgcctgatttcgaaccgagaggctgtccgcggggggccagtttttcatggtacatctacagcccgctccgtgtgaaatatccatatgtgcgaggtgtgctgatcaatttgtggcgggaagcattgcagacgcatcaaaatccgctggatgcctggaaatcgatcgttgaaaaccctgaaaaagcgaagtcctataaacaggcaagagggaaaggcggctttgtccgcgcggaatggccggaagtgctgaagctgatttcagcctctctgctgtatacagtgatgaaatacgggcctgaccggaatgtcggtttttctccgatcccggcgatgtccatgatcagccacgcgtcaggttcgcgattcatgtctttaatcggcggcccaatgctcagtttttatgactggtatgcggatctcccgccggcgtccccgcaaatttggggtgaccagacggacgttccggaaagcagtgattggtacaattcaggctacatcatcacatggggttccaacgttccgttaacgagaacgcctgacgcgcactttttggcggaggcccgctataaaggggccaaggtgatttcaatcagtcccgattttgcggaatcctcaaagtttgcggatgactggctcagtatccgccaagggactgacggagccctggcgatggcgatgggtcacgtcattctgcaggaattttacgtgaatcaagagacggaacgtttcatggaatacgcgaagcaatacacggattttccattcctcgtcaccttatcaaaagaaaatggcgtatacacagcgggacggtttctgcatgcgaaggatatcggacggcagacaaagcatgatcaatggaagccggcggtctggaatgaacagacaggtgcgtttgccataccgcaaggaacaatgggctcccgctgggacgggcagcagaaatggaatctgcacatgatcgatgaagacaccggggaacagatcgagccccgtctctccgtgctcggaatagaggacgaaatcagtacggtgcgcattccgtatttttcaaatgacggaaacaaagtgcttgagcggaatcttcctattaaaaaactggaactgaacggtgaagaggtgtgtgtcacgactgtatttgacttgatattggccaactacggcgtgaaccggggcatcggcggacaatcagccgcatcttatgatgatccccgtccgttcacacctgcctggcaggaacagatcacgggaattaaaagagaagccgttatacagattgccagggagtttgcccaaaatgcgattgatacagacggcagatcgatgattatcgtaggggcgggaatcaaccactggttcaactccgacacgatttaccgcgcggtgttaaatcttgttttattggtaggcgcccaaggcgtaaacggcggaggctgggctcattatgtcggtcaggaaaagctccgtcctgctgaagggtggcagacgatcgcaaccgcaaaggactgggaaggcgtgcctaaactgcaaaacggcacctcatttttctactttgcgacagaccagtggcgttacgaagaccagccgatcagtgacttggcttcaccgatcgcttcttcatcccgctacaagcatcacgccgattacaatgtgctggcggcgcgattagggtggctgccgtcctacccgacattcaatcaaaacggcattgatctgtacaaagaagctgagaaggcgggggcggcgacacctgaagacgtaggtgcgtacgtggcctcacagcttcaggagaaaaaactgaaattcgcgattgaagacccggacaatgaagtgaatttcccaaggaatctctttgtatggcgggcaaatctgatctcaagctcaggaaaagggcatgaatattttcttaagcatctgctggggacgacgaacggtttgatgaatgacgacagcgacagcatccgccctgaagaaatcaaatggcgggagcaggcgccggaaggcaagctcgacttgttaatcaatctcgactttcgaatggccggtacggcgctgtattccgatatcgtgctgccggcagcgacatggtatgaaaaacacgatctcagcagcacggatatgcacccgttcattcatccattcgctccggcgatctcggcgccgtgggaatcgaggtcagactgggatattttcaaagcactgtcaaaagccgtttccgacctggcggaagaagtcgatatggagctggtgaaagaggtagtcgcgacgccgctcctccacgacacgatgcaggaattggcccagccgttcggaaaaatcaatgactggagcaagggcgaatgtgaagccattccgggaaaaacgatgccgaatatccaagtcgctgaacgggattacaaacacatttttcataaaatgaccgcgctcggccctcatacggctttaaaaccgagcggaacaaaagggatgagctggtcgattgcggatgaatatgaatcactcaaaaagagactgggagaaaccgattcagacggcgttgccaaaggatgcccgaatataagtgaagcaaagcaggcggcagaagcgattttaaccctgtcgtccacctcaaatggaaaggtcgccgtaaaagcatgggaatcgcttgaaaacatcacaaacctgaagctgaaagacctggcggaagaacgcgaggaagaatgctttacgttcgagcaaattacagcccagccgaaaacggtcatcacgtctccggcctttaccggctcagaaaaaggagggcgcaggtactcgccgtttacgacgaatgtggaaaaattaatcccgtggaggacactgaccggcagacaatcctattatgtcgatcatgaactgatgatggaattcggtgaaacgatggcgacatttaaaccgatcctccagcaccgtccgttcctgagcaagcggcctgatcaagagggcaaagagatcgttcttaattatttgacgccgcataataaatggtccgtccacagcatgtattttgattccctgccgatgctgacgctgttccggggcgggccgaccgtgtggatgaataaagatgacgcaaaggacacggatatcaaagacaacgattggattgaatgcttcaaccgaaacggcgttgtcgtggcgagagcggttttgtctcaccggattcctaaaggaatggcgtttatgcaccatgcccaggaccgccacatcaacgtgcccggcacaaaactgacgaataaccgcggaggcacccataacagcccgacaaggattcacgtcaagccgacccagatgatcgggggctacgcacagctcagctacggctttaactattacggtccgacggggaatcagcgcgatctgaatgtcgtcatccgcaagctgaaggaggtcgattggcttgaagattaaagcgcagatcggaatggtcatgaacttggataaatgcatcggctgccacacgtgcagcgtcacctgtaaaaacacgtggacaaaccgttccggtgcggaatatatgtacttcaataatgttgaaacaaagcccggtatcggctacccgaagcaatgggaggaccaggacaaatataaaggcggctggacgttgaaaaaaggaaagcttgaactgaaatcaggcccgaaaacaaaccggcttgcaggccttttctataacccgaaccagccgacgattgatgattactatgaaccttggaactatgattatgaaacattaacaaacagcccgcagaaaaagcaccagccggtggcgcggccgaaatcgtccttgacgggcgattttatgaatatcgaatggggcccgaactgggaggatgatctcgctggcggccacattacgggtcttgaagatccaaacgtgcaaaagatggaggaatcgatcaaaacagaattcgatgaagtctttatgatgtatctgccgcgtatttgtgagcactgcatcaatccggcgtgcgtgtcctcctgcccgtccggcgccatgtacaaacgcgaggaagacggcatcgttctcgttgatcaaaacgcatgccgttcatggagatattgcgtctcatcctgtccttataaaaaagtctattttaactggcaaacgaacaaagcggaaaaatgcacactctgctttccgcgcttggaggcggggctgccgaccatctgctccgaaacgtgtgtaggcagaatccgctatctcggcgtcatgctgtacgacgcggacaaagtggaggaagcggcctccattgaaaatgaaaaggatctctaccattcccaattagacgtttttcttgatccgaatgatcctgaagttgccaaactggcaaaagaacaaggcatcccggctgaatggatagaggccgcgcagcaatcgccgatctacaaaatgatcatcgattggaagattgcgctgccgcttcatcctgagtaccgcacactgccgatggtttggtacattccgccgctgagcccgattatgaatctctttgaaggaaaaggcagccggcaaacggcggaagatatttttccggctatcgaccaaatgagaattccgattgactatttggcccagttattaacagccggtgatacggatcatattcggtcaacgttaaagaaaatgtctgtcatgcgccagtatatgagagcagtccagacgaataaatccatcgacccggcactgatctccagtgtcggcttaacagaaaagcaaattgaagacatgtatcggctgctggcgatcgccaaatatgatgaccgctttgtgatcccgagcagccatcgagaagaagtgtctgatttatacgctgaacaaggaagctgcggcttgtcattttcaggcggccccggctcttgtttctaacttttgataaatgaggtggaacaagatgaacaccacagaccggcaaatgacattctccgctctttccattcttctctcttatccggatgaagagtggagagccgggcttcccgattggaaggctcttatccatgaaatcggcattcagcaaatccgtgagaaactgctgcactttttagaggcggcagccggcttttctccgcaagcgctgattgaacactatgtgtatacgttcgacttcgggaaaaaaacgaatatgtacgtcacctactttaactcaggcgagcaaagggagcgcggaattgaactgctgcatttaaaaaacacctaccagcaatccggtttcctgccgacagagaaagaattgcctgattatctgccgctgatgctggaattcgccgcggttgcggagattgaagcggcgagaagcgtgtttgagaaatacctgtccaatgtgagggagctggcttcccgcctcgaaaaaaatgacagcctctatgctgagctgctgcacgtgctgcaggccgcgctggaaagcatcggtgtacgtgaaagcactgaagaaggggctgctcaggcatgagcgggcagatcctgtgggggattatgccgtacatggtattgacgatctttatcggcgggcatatttaccgctatcagcatgaccagtttggctggacggcgaaatcaagcgagctgttagaaaagaaaaaacttgcggcgggcagcacactttttcactggggactgctgttcgttgtcggcggacatgtcatgggaattctgatcccggaaggcgtgtatactgtactgggcatttcagagcatacgtatcacaaaatggcgatcggcgcaggcctgccggctgggatcgcggcttgtgccggactagtgatcctgacatacagaaggctgtttgacaaaagaatccgcaaaaccagctcgccatcggatatcctgacgcttattctgctgctgttcatgatgctgtcgggcgttgcggccacgtttctcaacattgactcgaaaggatttgattacagggcaacagtcgggccgtggttcagggaaattgttttgttccggcctgacgcttctttgatggagagtgtcccgctatggtttaagtttcatatcatcatagggtacgtcgtttttatcctttggccgtttacaagattggttcacgtgttcagcctgcccctcaagtatttgacccgcagctatgttgtctatcggaaacgcacgtaaaaatccccctgcaagagggggatttttttatggtgaaaaaataaaaacataagatattttctgccaaggtaatggctgggcggcggggattcctgttatgttttatgtggaaataatatcaacaaaaggagagtgaagaatgaagcggattttcctcattttagccgcctgtctgatgacaagcgccggcgtcctgacactcagacattctcatgtattaaccggcggcacagcgggactgtcactaagcctgtcgtacttgtttcattcctcatttgcgattatcttctttctgatcaatatcccgttttatatattttctctcatcagaatgggaatcaaattcactctatccaccgtttttgcagtcactgtgctgactctgtttaccggcgcggatcactggctgccgccggtctctgtttcaccgcttgccggggcgatttgcggcggggcgctgatcgggttcggcctgtcgctcatgttttatcatcaggcatcgctcggcggcgccaatatcctcgctttatttctgcaaaagcgctgcggatggaatccgggtgccgttaatttcctcttcgattttggcgtcgtgctggccggcattttttccgtcggattgctgaaagggctcttctccttagtgtcgatagcggtcaccggtctgatcatcggcatcttcaaaaataaaatcaaaggcagctgctcgctcaatccggcattgcttcagaacatcacaaccggccagtcacaggaagtgtcatcataatcctttccgctcgtgcggagaggatttttcatatgtttacaggccggaaaacagagggtatacagagatatcggatcagatgggagagagtcgggatgctgaaaaggagactggaattttgctttttatatatgatgcttatcggagcatatgtcatatggttttttccggtttccaggcttgagttttacggagggttgctttgctatgcaagcattattttgttcagcatctattcgttaattcttgaaaaccgcacctctcagcacacgctgttatggattcatattcttgtgttttttccgatcgccgggtacttattttaccttttttccggccagctttatgaaaaaggcaagctgttcaggtcgaaacggacatacaaccgggaaaagctgagaacgatatttgatatggaacagacgcccgatctgtccgggctgaaaggaaatcagaagcgtttctttcaatattcaatcaaggcgtctcatatgaatatcaatacaaaaagcaggctgaaggtgctcaaaaacggggatgaaacatttccggagctgtttgaagcgctccggtcggcagcatcatttatacatattgagtattacatgttcaaatcagacatgcttgggcacaagatgatggacattatgatggaaaaagcgcgtcaaggcgtggaagtgcggtttttgttcgacgcggccggcagcctgaagctggccggaaaagacattaaaaaactgaaacgcgcgggcgtgaacatcgtcccgtttctgccgctgaaatacggttttttcaaccaaaagttcaatttcagaaatcaccgcaagatcgtcatcgttgacgggaaaaccggttttgtcggcgggctgaatgtcggcaaggagtatatcggcaaagaccaaagtgtcggtttttggcgggacacccatatgaaagtcgaaggagaaatcgttcagacgctccacagcatttttatgcttgattgggaatacgtttcggatgaggtgctgattgatcagaaagcatacagccgcccggtccctgcagaaagcggcggcgtctatcaagtcgttccgacgggccccgatatgaaggagcggatgagcgatctgtattatgccatgatagcggcggccgaatcatctgtatggatcgcgacgccttatttcgtgccgaatgagccgatccgcacagcgctaaaggaggctgctgccagaggcgtccgggtgcgagtcatggtgccggaaaccaatgacggatttttaacccagtacgcgacgagatcgtatttccccgagcttcttcgcgaaggaatcgaagtctattcctatcaaaaaggctttatgcatcaaaaggtgctcatcactgacggaaacctcgcctctgtcgggacggcgaacatggacatgagaagctttcagctgaactttgaggtcaatgtcttttttacagatcaaaaggcgatcaaagatcttgaagcgcattatctggaggatatgagagagtctgagaaaatcagccccgtccgtttctataagcgcacattatgggaaagaacgaaggaatccttcgcgcggttattttccggcgttttataaaaaacgcttttaaaactccttgtgtatagtataattgagaaatattatcattaggaacgaggcacaaggaggacggaaacgtgctgcgacaatttttttcttattataaaccgtacaagaagctgttttttctcgacttcttttctgccatcgccggcggattgatggagctgagttttcctctgattgttaattactttatcgatacattgctcccggggcgggattggcgtctgattattttgacttccgctgctttattcggagtctacgccctcagctcggcgcttcagtatgttgtgacgtattggggccatatgctcggcattaacattgaaaccgatatgcgtaaaaagctttttgaccatctgcaaaagctttcgttcaaattttacgataacaacaaaacgggcagtttaatgtccaagctcaccaatgatttgatgtatatcggagaaaccgcccaccacgggcctgaagacctgtttatcgcggtcatgacgattttgggcgcgttcggtgtgatgctgttcattaactggcagctcgcgctgttgacctttatcattatgccggtcgtcatttggcttgctttgtatttcaataaaaaaatgacctctgcgtttacaaaactgaacaaagacgtcggagacttcagcgcgagggtcgaaaacaatatcggcggcatccgtcttgttcaggctttcagcaatgaagcgtttgaaacgcagcggtttgacgtgaacaatcagcgtttccgcaaaacaaagctgacgtcatataaaatcatggcgaaaaacggctcgatcagttacatgctgacaagattcgtcacgctgttcgtcctgttgtgcgggacatggttcgtgatccgcggatcgttatcttacggggaattcgtcgcttttgtgctgctgacgaacgttctgttccgtccgattgataaaatcaacgcaattattgagctgtatccgagaggcatagccggttttaaaagctttatagaaataatggaaacggagcctgatatcaaggacgccccgaacgcgagacatgtgtccggtttaaaagggaatatccgttatgatggtgtgtcattcggttacgaagaaaacagcccggttctgtcgggaatcaatttgtccattcatgcaggggagacagtcgcattcgttgggccttcgggagccggaaaatcaacgctgacaagtctgctgccgcgtttttatgatccgtctgaaggcgtgatttccatcgatggaattgatattaaggacatgacgctgtcatcattgcgcggacaaatcggcgtcgtccagcaggatgtctttctgttttccggcacattgcgggaaaacattgcgtacgggcggctcgatgcgtctgaggaagaaatccggcaggccgtccgccaggcgcatttagaggagctggtaaacgggtatcccgacggtttaaacacggtgatcggcgagcgcggcgtgaagctgtcaggcgggcagaagcagcggctttccatcgccagaatgtttttgaaaaacccgtcgatcttaattttagacgaggctacatcagccctcgatacagaaacggaagccgccattcaaaaatcgctgcaagagctgtctgaaggacgcacgacgcttgtgatcgcccatcggctggctacgattaaggatgcggacaggatcgtcgtcgtcacgaaagaaggcatcgctgaacaaggtcatcataaggaactgctggcatccggcggcatataccagagactccatcaggcccaattcggcgagctgatacatgaataatggaaaaaggatagacgagcgggggccgggcagcctcctgtctatccttttttttatgtagtccgtatttaatgggcttctttttgcgcaggttcgatgatatgtttgaaacggtcaacaagctgcaccgctttctttccttccactacaattaaatattcttgttctttatgagccattctgaacgtttccagctcaatgatatctttgattttgcacattgtttttttagagtagatatacagctcgtggcctcccgtgtggcaaagctgataaagctgaagcatgtttcttaaagtgaacttcttagcggctattttcaaagatgtaatgtttttcatgtgttttctcctccgtctgatggtctgttatttcggaaattccccatatgaacgggtgataaacctggttatgccttccacctcagcactccgcccgccaggcgtttaactccgcggatggcgcttaattcttcgacgagccggagcagcgcccggtctttctctttcgcctcaatcataaaatcgatgcccgcatcccattgtctgaaccgctccagcaccggcagaataaaattcgcgtccacatagtccgcatgactgcgtacggctgattctgattttggcgaggagagatggaccttcggctttaagccgatccgctgccatgttttgatcatccgcggaagaatgtcatctaaatcagcgtcatcggccggattggcgtaaaaatggtgataatcaaacacaaacggaatgccttcttgctcacatacactgagtgtttcctcggacgtatatgttttatcatcgttttctaaagtcatccgctgtttgatgacttcgggaagttctttcagattcacgcggaaacggccaagcgcgctttgtttgtcaccgtaagcgcctccgacatggatgttgatgacggaacggtccgcgatgcccattgcgtccagcatgtcataatgataggccatatccttgaccgcatttgcggtaatctcccgtttcgggcttgtaaaaagcgtgaattggttcggatgaaagctcgttctgaggtcatattttctgaccagcccgccgatctcacgaaactcctggcgaaacggcgtgacaaaatcccacagtacatccgggtgcgtggcgagcggcacaattgagcttgagaacctgtacaaagggatgccgtggccgaccacatagtggagggtgcgcagcgtattggtaagatttgctttcgtcacagaaagcagagcgtctttccgctcactgcgggaaagcttggtatagcgcgcatatgttaaggttttggcgggggacgcgtcccaaaggcacatggcgtttgcgacgaatccgaatctgaacagcatatggtttctcctttataaaaagtaagatatggcctttcccagccattctgcaggaagctgtctgacggagcgctgtttcactttttctaatgtgagaagctcggatttttcgatgtcctgctttatggttgaaagcacttcctttgtaaaggcctcatcatgaatgatgacatttacctcttcattccagaacaggctccgtttatcaaaattcggcgtgccgataatgctgatgcggtcatctataatgaaggctttaacatgataaaagccttgataataccgatagatgaggcagccggccttcaggagctcgggataataggtaaaagctgtttcccgaacgagcgggtgatctgatttcatcggaacgatcaagatgactttgacgccttttcggcaggctgaaataagcgcttcctgaagctttttgctcggtacataataaggcgtgccgatgatgatttttttctccgccttacggatgcagttttcataatgcgattcaagcgaaaaaccgtcagatgcatatgtcctatgagagatattcccttcggataatgccggataaaccccgggtgattcgggtgtttttccggtgtttcgtttcaggtcgcttacaaaaagagtctgaagatctgccgtgccttcgccggtcatccgcaggtgataatcctcccagtttccgaacttcgctttttttccgaggtactcttcagcgatattaaagccgcccacatagccgattttgccgtcaatgacggtcactttccggtgattccgtttttgcagcctgaaaaaaagaaagggaaatgccggtttatttagaaaatgaacgtgaacgccggcttttttcatcgtttgaatggaaggctttttcacttggcggctgcccgcccaatcgagcagcagatatacggagacgccggcccgggccttttctttcaataaatcaaacatctcatggctgacttggtcgttcttcataataaaaaacatcatatgaatagaagagacggcttggcggatatcagccgtcatctgctgcacaagctcgctgccgcagtgaatgagtgtgatatcactttttttggggtcaaaaacgggctcatacgcctgttttttgtacgccgcccggccaagcagcatatcaagcagcataagtgcgatcaatatgataaaaatgacaagcaacacaaaaatgaccttcataccgacgctcctttccgaagtatccgtagtgtgccctgagaatgtgaatttaattattgactgaacactcattcattatttatgataaagtaaagatatgacaatgaagaggggaatcagaacaaagggggagacaagatgaacgcatttctcatggtaaacgcgctgctgttttcagctgtaaccgcttacgccgtttatttattcgtttacctgatcagaacgaggatcgcttatattaagctcggccaaagggaagaatttgataaacgcctgaaagaacgtcttcagaagatatgggtgaatgtgttcggacagaaaaaattgctgaaagataaaaagagcggaatcatccacgttctgtttttttacggttttatactcgttcagttcggcgcaattgattttattctgaaagggctgcttcctgaccggcatctgccgttcggcccgctttatccggcatttaccttttttcaggaaatcgtcacgtttctgattttaatcgccgtagtctgggcgttttaccggcgctacattgaaaagctcgtcagattgaaacgcgggtttaaagcggggcttgtcctgctgtttatcggcggactgatggtgacggtgctgctcgggaacgccatgaaccttttatggcacgatcattctctgtcttggacggaaccgatcgcttcctccattgcgtttgtgctcggcggtctttcagcgccggcggccgccgccgtgttttatgtttcatggtggcttcatctgttgtttttgctcagctttttagtgtacgtgccgcaatcaaagcatgcgcacttaattgcgggtccggcgaatgtgttcctcagcaggctggattcaaaaggaaagctggaaaaaatcgattttaccgatgagacgaaagaaagctacggcgtcggaaagattgaagacttccgccgctctcagcttgtcgacctttacgcctgcgtcgaatgcggccgctgtacaaatatgtgtccggcctccggtacgggcaagatgctctcgccgatggacctcattttaaagctcagagaccatttgacggaaaaaggcgctgccgtgacatcaaaatctccgtgggtgcccgcgcccgtttttcagcacacgaaggcgaatcagctcgccgcggcttcctcagggggaggatcgcgtgaagcggcggcagccattgattacaacccgagcttaatcggcgaggtcatcacggaagaggagatttgggcgtgcaccacttgccgcaactgtgaagatcaatgtccggtcatgaatgaacacgttgataaaattatcgatctgcgccgctatcttgtgcttacggaagggaagatggacagcgacgcgcagcgggccatgacaagcattgaaagacagggaaacccgtggggcttaaaccggaaagagcgggagaactggcgggagcaggctgatacagagattccgacagtgaaagaaatgaaaaaacaagacaaagagttcgactatttgttttgggtcggctcaatgggttcctacgacaacaggagccaaaagattgccgtttcatttgcaaagctgctcaatgaagcgggcgtatcctttgcgattctcggcaataaggaaaaaaactcaggcgatacgccgcgccgtttgggcaacgagtttctgttccaagagctggcggaacacaacatcggcgaatttgaaaaacacggaatcaaaaaaatcgtcacaattgatccgcacgcctataatatgttcaaaaatgaataccctgatttcggattccgggccgaagtctatcatcatactgaattattagccgagcttgtgtcacaggggaaactaaaaccgcttcacccggtcaatgaaacgattaccttccatgactcgtgctatttaggaagatacaacgaagtgtatgagccgccgagagcgatcttaaaagccattccgggcgttcaattgaaggaaatggagcgcagccgcgaaaacgggatgtgctgcggcgccgggggagggctcatgtggatggaagaagaaacgggagcgaggatcaacacggcccggactgagcaggcgctttctgtcagtccgacggtcatcagctccggatgtccttactgtctgaccatgctcggtgacgggacgaaagcgaaagaagccgaagacgcgatcggcacttatgatgtcagtgaattgctcgccatgtctgtattcggcgccgaaaaacaagagtctttatagaaagaagcgggccgccggcgcatatgccggcggctttgttttcgcacatcagccgatttatgaaggggcggctctaaaatttcttaaattacgctgtttagggtagcatattctgttttaatttgtttataatgagaggtatggtttatgaacaaaacaatacaaattcgttcttattataggatagaaacagatacatataagtaatagaaagggagtgtccgaccttgagtatcaaacaatattctcaggaacagctgaagcagatggctttagttgaaatcgctcacgaaattttctcagaacataaaaaaccggttccgttccaggagctgctgaatgaaatgatctccttactcggtgttacgaaagaggaactgggcgaccgtatcgcccaattttatacagacctcaacattgacggccgctttattgctctgtcagatcagacatgggggctccgcagctggtatccgtacgatcagctggacgaagaaacacagccgactgtaaaagcgaaaaagaaaaaagcgaaaaaagccgttgaggaagatctcgaccttgatgaattcgaggaagttgatgaagatgacatcgatctcgatgaaatggaagaagatattgaccttgacgcagacagctttgacgacgaagatatcgatgaagaagatgacgacgagcttgagattgaagatgagatgattgaagaagatgaggaagattatgatgatgaggaagaggatcgcaaagactgattttatatcagcaaaacgatcttgactttcattgtcgaactatgtagtatgtattttgggctcttcaaaaagaagagaattcataagagtgctacgctccctttcaagaaattgaaagggagctttcttattttcatctcccaaattcttttacacatcatttgtttttagtgaaatgattttctataaaacggcacattttaaggaatgtagcgcagaccgaagagaggagcaaacgaaatgacgaaatatatttttgtaaccgggggagttgtatcatcactcggaaaaggaattgtggcagcatcacttggccgccttttgaaaaacagaggcatgagcgtcaccatccaaaaatttgacccttatatcaacgttgacccgggaacgatgagcccgtaccagcacggtgaggtattcgttaccgatgacggcgctgagactgaccttgacttagggcattatgagcggttcattgacattaatctgaacagattcagcaacgtgacgacaggtaaaatctattctgccgtattgaaaaaagagcgccgcggggactacctcggcggaacggttcaggtcattccgcacatcacaaatgaactgaaagaccgtgtgtaccgtgcaggcaaagaaacaaacgcagatgtagtcattactgagatcggcggaacagtgggagacatcgaatctcttccgttccttgaagccatccgtcaaatgaaaagcgacatcggccatgaaaacgtgatgtacattcactgtacgcttgttccgtacatcaaagcggcgggcgagctgaaaacaaaaccgacgcagcacagcgtaaaagagctgagaagcctcggtattcagcctaatatcatcgttgtgcgcacggaaatgccgatttctcaagatatgaaagataaaattgcgctcttctgcgatattgacacgaaagcggtcatcgagtgtgaagatgcggacaacctttactccatcccgcttaaccttcaggagcagggactcgataagcttgtctgcgatcatatgaaattagaatgcaaagacccggatatgacggaatggaaagaccttgtcacgaaagtgaaaaacttgtctaaaaccattacaatcagccttgtcggtaaatacgtcgagcttcaggacgcttacatttcagtcgttgaatcactgcgccacgcgggctatgcgtttgacgctgatgtgaagatcaaatggattaacgccgaagaagtgacagaaagcaatattcaagagctgactggcggcacagacggaatcatcgtgcccggcggtttcggggaccgcggcgtagaagggaaaatcatcgccgccaagtatgcgcgtgagaataaaattccgttcttcggcatctgcctcgggatgcagattgcatccattgaatatgcgcgaaacgtattaggtctggaaggggctcactctgcggagatcgatccgtccactccttatccgatcatcgaccttctgccagaacaaaaagatgtcgaggatcttggaggaacgcttcgtctcggactgtacccttgtaagcttcaggaagacacgaaagccttcgaagcgtattcggatgaagtggtatacgaacgccaccgccaccgttatgaattcaacaacgaatacagacagcaaatggaagagaacggttttgtgttctcaggaacaagccctgacggccgtcttgtggaaatcatcgagctgaaagaccatccttggtatgtcgcttgccagttccaccctgagttcaaatcaagaccgacaagacctcagcctttattcaaagactttatcggcgcttccgtacaagctgcagaacagaagtaataaaaaaagacttgcctcctttaaaagcggcaagtcttttttctgcatcaggcatattcctgcatcatttcctttaacgtaaaggacagcgcgtgatagacatacaggcctgtcattaatgaaggaaagccgtatcttgtcccgtcttcatcgggcagaagcggcatttttaatttgctgtcaatatgaacatcacaaaattcctcaatcccggtttgatctttgatgacaggagatacgcaaacgaggccgacccctttttcataaagcttttgagccagcgcctgttcttcagccgtgcccggacctgaacaaaacatcagcaccctgtcgctttctgtaatcgaatcagctgtatccggaaacgctttgacagaaggcatcggttctgagccgagttccgcctcgcacaaaatgccctgcatctcatttgcgccgtataaataaatggtatgaccgctgacggctgcctgcgccagcaggcgcgcgccgtcttctattgcatcggactccttatcctgaatgcgggaaaaaatgcctgcaagctgcgtcgtaaatatctttaacatgagtgaaacctcctttacacatacaagaacagtatacaacaaaagagaaaatgctcagaaaatgtcggaaagtagactattataattaaaggaaatgtgaaaatcaaacagaatacataaacaactgcttccttttgacgaaaatgataatattggggtgtaaaatgatgaatgaaaagattttaatcgtagatgaccaatacggtatacgcatattgctcaatgaagtgttccataaagaagggtaccagacgtttcaggccgccaacggcatacaggcgctggacatcgtaacgaaagaacggcccgatctcgtgcttttagatatgaaaatccccggcatggacggaatcgaaattctcaagcgcatgaagatgatcgacgaatccatccgcgtcattatcatgaccgcttacggagaactcgatatgattaaggaatcaaaagagctcggagcgctgactcattttgcgaaaccttttgacattgatgagatcagagacgcggtgaaaaaatatttacctctaaaatcgaattaataaaattagaaacaattatgtcattgtgttgccgatttgtcgaaaagttggtatcctagagatggagaaaaagcgatctgttgttttacatatgacaggtttttatggtcatgctataggtggaaagcttttttcgagaagaagcaaatcaggctacataaggaggactttcgacatgcctttagtttcaatgacggaaatgttgaatacagctaaagaaaaaggatatgctgttggacaatttaacttaaataaccttgagttcactcaagctattttacaagcagcagaagaggaaaaatccccggttattcttggtgtttcagaaggcgcgggacgctacatgggcggcttcaaaacagtggttgccatggttaaagctcttatggaagaatacaaagtgacagttcctgtcgcgattcacttagaccacggttcaagctttgaatcttgtgcgaaagcgattcatgcaggtttcacttctgtaatgatcgacgcatctcaccatccgtttgaggaaaacgtagcaactacagctaaagtggttgagcttgctcatttccacggcgtttcagttgaagctgagcttggaactgtaggcggacaggaagatgacgtgatcgctgaaggcgtaatctatgctgaccctaaagagtgtcaagaacttgtagagcgcactggcatcgactgccttgcacctgcactgggttctgttcacggcccttacaaaggcgaaccgaacctcggtttcaaagaaatggaagatatcggcaaatcaaccggccttccgttagtacttcacggcggtacaggaattccgactgccgacattaaaaaatcaatctcacttggtacggctaaaatcaacgtaaacactgaaaaccaaatttcttctgcaaaagctgtccgcgaaacattggcagctaagccgaacgaatacgatcctcgtaaatatcttggacctgctcgtgaagcgatcaaagaaacggttatcggcaaaatgcgtgagttcggttcttcaaaccaagcttaatccaatgtaacatccataaaccgcctgacagcattgacaggcggttttatgtcttacctttagaaagcgcaatcatgttttacagttctgaaaatttattactggggaggctttccttatgttatttttcattgatacagcaaacattgacgagattaaagaagcttatgaacttggcgttcttgccggagttacgacaaaccctagtttagtggcgaaagaagctgacgtgtctttccatgacagacttcgtgagattacggaagtcgtgagcggatcagtaagcgcggaagtcatttccctgaatgctgaagaaatgattgaagaaggtaaagaacttgcgaaaatcgcgccgaatattacggtgaaaatcccgatgacgtctgaagggttaaaagccgtaaaagcgctgagcgacctgaacattaaaacaaacgtaacgctcattttcagcgccaaccaggcgcttttggcggcaagagccggggcgacttatgtatctccgttcttaggccgtctggatgacatcggccataacggtcttgaactgatttcagaaataagacagatttttgacattcatgacattgatactcaaatcatcgcagcttccatccgtcatgcgcagcacgtgactgaagccgctttacgcggtgcgcatatcggtacgatgccgctgaaagtcattcaccagctgacgaaacatccgttaacggataaaggcatcgagcaattcttggctgactggaataaataagggggaaaagggcggcaaaccggttgcatccgtttgccgcacccttatgttttcctgtttggcagcgggccttcagtatcaaagtgaagagtgtgtttccccggaatatgaacccggcgggcctctgtgcatcctgtgttaaaaatgccccgcaaagcttcgctattttcttcctgttattttataatgtccttgtattctttctcttcgaattggctacattttggacaagagctttatttgcagagacagaataaaatgccattttatttacgctccgcagctatcttcttatggaaggagactatcatggaaaagttgaatattgccggcggcgatccgttaaacggaaccgtacatatcagcggtgcgaaaaacagcgccgtcgcattgatacccgcaaccattctggcaaattccgaagtaacgatcgaagggcttccggagatctcagatattgaaacgctgcgtgacctgctgaaagaaatcggcggaaacgtccattttgaaaaaggagaaatggtcgttgacccttccccgatgatcagcatgccgcttcccaacggcaaagtgaaaaaactccgcgcttcctattacttaatgggcgcgatgctcggccgcttcaaacaggcggtcatcggactgccgggcggatgccatctcggtccgcggccgattgaccagcatatcaaagggtttgaggcgcttggagcggaagtcaccaatgaacaaggcgcgatttatctgcgcgccgaaaggctgagaggcgcacggatttatttagatgtcgtcagcgtcggagcgacgattaatatcatgcttgccgctgtactggctgaaggtaaaaccgtgatagaaaacgccgccaaggaacctgagattattgatgttgccacattgctcaccagcatgggcgcaaagatcaaaggtgcgggaaccaatgtaatcagaatcgacggcgtaaaagagctgcacggatgcaggcatacgatcattccggacagaattgaggcgggcacctttatgatcgccggcgccgcgatggggaaagaagtcattattgataatgtcataccgactcacctggagtctttaacggcgaagctcagggaaatgggtttttacattgagacgagtgacgatcagcttcttatgctcggcgggcagaagcagataaaaccggtcgacgtgaaaacgcttgtttacccgggattcccgactgatcttcagcagccgatgacatctctgttaacgagagccagcggcacgagcgtcgtaaccgacaccatctactcggcccgatttaaacatattgatgagctgagacggatgggggccaatatgaaagtggaaggcaggtcggccattatcaccggtccggccgagcttcagggcgcaaaagtaaaggcgagcgatctgcgtgcaggcgcttgtctggtcgtcgccgggctcatggctgacggcgtaaccgaaattaccggtcttgagcatttagaccgcggctacagcaatcttgagaaaaaactcgaaggtctgggcgccacaatctggcggcaaaggctgacggacgaagagatagaacagctccaaaattcatagaaatgcggacttttgagaggagatcgtgttgaaatggaaagaagcttatcgatggaattggttcgagtcactgaagcggcggctttagcatctgccagatggatgggccgcgggaaaaaagatgaagctgatgatgcggcgacaagcgcaatgcgtgacgtgtttgacacggtgccgatgaaaggcacggtcgtgatcggggaaggcgagatggatgaagcgccgatgctttacatcggcgaaaagcttggaaacggatacggcccgcgcgtcgatgtcgccgtcgatcctcttgaaggcacaaacatcgtagcgagcggcggctggaatgcgctgacggtgatcgcggtcgccgaccatggaacattgctgaacgccccggatatgtatatggaaaaaatcgcggtcggtcccgaagcggtaggctgcatcgatatcgaagcgcctgtcattgataacttaaaagccgttgcgaaagcgaaaaacaaagacattgaagatgtcgtggcaaccattttaaatcgtgacagacacgaaaaaatcatctctgaattgcgtgaggcgggcgccagaatcaaactgatcaacgacggtgatgtcgcgggcgccatcaatacggcctttgaccatacgggagtagacattctcttcggttcaggcggggctcctgaaggcgtgctgtctgccgttgcgttaaaagcgctcggcggcgaaatcatcggcaggcttctgccgcaaagtgcggaagagcaggcccgctgtgagcgaatgggccttgatgtatccaaagtgctccggatggaggaccttgtgagaggggatgacgccatttttgccgcaacgggtgtcacggacggagagctgctgaaaggcgttcagttcaaaggctccgtcggcacgactgaaagcctggtcatccgggcgaaatcaggaacggtccgattcgttgacggaagacacagcctgaagaaaaaaccaaatcttgtgatccggccataaatagagaaaagcgggacggaaagtcccgcttttcttttgcaaaaaagagtcaaccctatcatttatatgtcaaagcattatttaagttgaataattttttgaaatgaggtaaaaataaagagtgctgcgatttttctgtgtcattccttcttttgagtactgggaaattttcaaattctaccgcatacagacgatataaatattgatcttctcaagtttttgtcctcgcttccttcaaaactcattaagacattccttttttaaaaaagcgccgatcatgggtggaagtgttaccgatagaagttcctgaacgttttataaaagaatgtgctttggcggaatcatgcgaagcagccgatttgaatgaaaacagcaatacattgactatgaaaagcgtggtgtttttatgaaagacgtatctatttcctctttggaaaatatgaaattaaaagaactatatgaactggccagacattataaaatctcctactacagcaaactgactaaaaaagaattaatctttgccatcctgaaagccaacgccgagcaggaggatcttctgtttatggaaggcgtgctcgaaatcatccaatcggaaggattcggcttcctcagaccgattaattactcgccaagctcagaagacatctacatttctgcttcccagatccgccgctttgatttaagaaacggtgacaaagtatccggcaaggtgcgtccgccgaaagaaaacgaacgctattacggacttttgcacgttgaagcggtaaatggagacgatccggaatctgcgaaagagcgcgttcattttcctgcgctgactccgctttatccggaccgccaaatggtgcttgagacgaaaccgaactatctctcaacaagaattctcgatatgatggctcccgtcggtttcggccagcgcggtctgatcgtggcgccgccgaaagccggtaaaaccatgctgttaaaagaaatcgctaacagcattacgacaaatcagcctgacgctgaattgatcgtgctcttaattgatgaaagaccggaagaagtaacggatattgaacgttccgtagcgggcgatgtcgtcagctcgacgttcgatgaagtgccggaaaatcacattaaggtagcggagcttgtgcttgaacgggcgatgcgtctcgttgaacacaaaaaagacgttatcattctgatggacagcattacccgcctggcacgggcctacaacctcgttatcccgccaagcggacgtacgctttccggcgggattgacccggctgcgttccatcgtccgaagcgctttttcggtgccgcgagaaacattgaagagggcggcagcctgaccattttggcgacggcgctcgtagacacgggctcccggatggatgacgtcatctatgaagagtttaaaggaacgggcaacatggagcttcaccttgaccgttctcttgcggaaagacggattttcccggcgatcgatatccgccgctccggcacgcggaaggaagagctgctcgtgccgaaagagcatcttgaccgtctatgggcgatccgcaaatcgatgtctgattctccggacttcgcagagaagtttatgagaaaaatgaaaaaaacaaaaacgaatcaggaattcttcgatctgatcaaccaagaatggaagcaggcaaacctttcatcatcagcccgccgctgataaaaaatgtatttgcaaatgcagtaaatgactgatataattctctcatatgcgttccggattcgctccggaataataactctgtttccacacgggattcagggcggaaggagatggatacaatgaaagcaggaattcatcctaatttcaaaaaagcaacagttaaatgcgcttgcggaaatgaatttgaaacaggctcagtaaaagaagaggtacgcgttgagatttgctctgaatgccacccattctacactggacgtcaaaaattcgcttctgctgatggtcgtgttgatcgctttaacaaaaaatacggtcttaagtaataatagattttacaggcaggcaagaattgcttcttgcctgttttttatgtccataaacaggaaaaaaaggggagcggatagcctatgtacataatgaagcaaagcggatggcttgagctgatatgcggcagcatgttctctgggaaatcagaagagctgatccgcagagtgaaaagagcgacatatgcgaagcaggaggtcaaggtgttcaaacctgccattgataatcgctacagtgaggaggctgtcgtttctcacaacggcacatccatgacaagccacgtcatctcgtcttcggctgaaatatgggatcatatcagtgaaagcacggacgtcatcgcggtagatgaagtgcagtttttcggcgaatcaatcatcggcgatttatccttgcttgcggataaaggctatcgtgtcatcgcggccggacttgatatggatttccggggagagccgttcggtgtggtgccgaatctgatggcggttgccgaatcagtgacgaagctgcaggcggtctgctccgtttgcgggtcgccggcaagccgtacgcagcgtttgattgacgggaagcccgcttcctatgatgatccggtcattttagtcggcgcgtcggagtcatacgaagcgagatgcagacatcaccacgaagtgctgaaaaaacagactgataaataacccttttcatgaaaacatcggtaaaaaatccggtgtttttttgacggtttttcaaaaattgtagttaattaacttaaaaaagagtatgaaaaaattaagtaattttcatctcttgaattttcatttttacaggcataaaatgactaagtaatgtaaatagttatgagacattgttcgaataattgtcaaaaaaagatatagcagatcgcgatcacactagccaaaatgggtaattacttaactttgttaactatttgaagaaagaaggagattttcttgaataatattaaagtaacgaaggaaggcaacttagaaactactttaagaggaaaagaagttctatctatccctactttaaataaaggtgttgcgttttcagcagaagaaagaaaaagccttggattagacgggctgcttcctccgaccattctgtctcttgatgagcaggcaaaacgcgcatacgagcagtttcaagctcagccggaccgccttcgccaaaacgtgtatttgaatgatttgcaaaaccgtaacgaagttcttttctttaaattgcttcaaaaccatcttcgtgaaatgctgccggttgtttacacaccgactgtcggtgaagcgattcaagaatacagccatgagtacagaagacctcaagggatttacctttctatcgacaatgtagaaggaatcgaagaggcatttgaaaaccttcatgccactgccggagatattgatctgatcgttgcgacagactcagaaagcatcctcggaatcggtgactggggtgtaggcggtatcaacatcgccatcggtaaattagccgtatacacagctgctgccggtattgacccaagccgtgttattcctgtcgttcttgacgtcggtacgaacaacgaaaaacttctgaacgatcctttatacatcggtaaccgccatgaacgtatccaaggcgaacgttatgaagctttcattgacgcttatgtaaaagctgcgcttaaatatttccctaaagctcttcttcactgggaagaccttggaaacaaaaacgcgcgcaatatcatgaagaaatacaatcatgaaattcttacattcaacgatgacattcaaggaacaggcgcgattacgcttgcaggtgtgcttgcggctatgaagaaaacaggcgcgtctattaaagaccagcgtgtggttgtcttcggtgcgggatctgccggaatcggaatcgctgaccaaatccgcgacactatggtgcttgccggtctttctgaagaagaagccaacaaagcgttctacacaatggactacagaggcttgttaattgaaggtatggaaaacattcttgatttccaagagccgtacctgcgcacagctgaagaaattaaagattggaaacgcgatgaaaacggacaaattcctttcattgaagtgatccgtcaagcgaaaccgacaatcttaatcggtacatcaggccaaagcggcgcgttcagtgaagaaatcgtcaaagaaatggcaaaacacgttgagcgtccggtcatcatgccgatgtctaacccgacaccgcttgctgaagccgttcctagcgatctattcaaatggactgacggcaaagtgcttgtggcgacaggaagcccgtttgacaatgtagagtacaatggcgtttctcatgaaatcggacaatctaacaacgcattcgcgttccctggacttggtctcggttcaatcgttgtagaagcgaaagtgattactcctgcaatgtttgcggcaactgctgacgcaatcgcagaaagcgttgattttgaaacaccgggtgcaggccttctgccgagcatgagcgacttacaagaagtttcaattaaagttgcgatcgccgtagcggaaactgccattaaagaaggcgtggcaaaccgcattcctgagaatgtagaacaagccgttcttgatgcaatgtggaaaccgcaatataaacaagttatcgctaaataatttttacgattaattttacagtccgagggaaagcttttatgtaaaggctaaagtatacggacattaaggatttggaggagaatattttgagcttcttagatattttaatcctcctggcgccgatctttttcgtgatcgtgctgggatggttcgcaggtcgcttcggaagttatgacgcgaagtcagcaaaaggggtaagcaccttagttacgaagtacgcgcttccggcgcattttatcgcaagtattttaaccacttcaagaagtgcgtttttatcacaggttcctttaatgatcgctttgatcattgggattgtcggattctttatcgtcattttgttggtttgcaaatttatcttcaagtatgatttaacgaattcatctgtattttctttaaactctgcacagccgacatttgcatttatgggtattccggtactcggaagcttattcggagcaaacgaagtagcgattcctatcgccgttacgggtatcgtggttaacgccatccttgacccgcttgcgatcattatcgctacagtcggtgagtcatctaagaaacaagacagcgaaaacgagaacttctggaaaatgactggtaagtctattcttcacggtctttccgaaccgcttgcggctgcaccgcttatcagtatcatcctggtactctgcggtgtaacactccctggcttgggtgaaaaaatgcttgatcagctcggaagcacaacatcaggtgttgcactctttgccgtcggtgtaactgtcggtatccgcaacatcaagctcagtctgccggctttcggtatcgctttgttaaaagttgccgttcagcctgcgctgatgtacttgatcgctcttgcagtcggacttccggctgaccagatcactaaagcggtattgctcgtcgcattccctggatctgcggtagcggcgatgattgccacacgtttcgaaaaacaagaggaagaaactgcgtccgcgttcgtgatcagtgcgattttatctcttatctcactgccgatcatcattgcgctgactgcataatgaaaagctccctgtttcagggagcttttttgattagaattgaaatttaaaaggcgaaaatctcgttttttttctgggtttcttatgttctgaagaagcggctgtttctgagaggggagctgtctgggcaagttcctggatgcgggaggccaatgtctgcaattcggtattgaggtcgtcaatttcccgtctgtgctgaagaagctgataagacaccccttcatccgccttttgtttcagctggcgttcaagctcctctatccttgaaagcagatggttctcatcctgtttctctttcgtgagaatgtccagtttgcgctccagctctgccaacctttgttcagcgccgccattgattttcggacgctgcaaaatgaagcccgtccgttttttcggctgccggggcacttgaacgtccagaagggcagtgccttcagaaatttgccgtttgaccgatttcagcacatcaagatcctcaggtgtaaaggaataatgtccgagctcattccgttcagccggaagattcagctgcttgacccacctttgcaccgtttttgcggagacgccgagctctttcgcggccatgtttgtattcatgatcacatacctcctttttgctaggtattcgaccatgaggcggcgttcccttcatgttagacaaaacaagaaggaattcgccaaagaaagcggcatttcttcaaaaaacgttacgcttcatacaattcaagcggaagcttgtcgggatcgaagaaaaaggtaaaccgtttccccgtcagcggatcggttctgatcggttctgtgccgacgccctttttctttaactccctgacggctgcttcaagatcgtttacggtgaaggcgagatgccggagacccgcggcttccggtctggtcggccgttcgggcggatcgggaaaggaaaacaattcaatcgcatacgcgccgtccagcgccagatcgagtttataagattcccgttcctttcggtatgtttcttttataatgccgaaaccgagtatctcggtgtaaaaagctttcgacttttcataatcagagcatatgattgctatatggtggatggatttcagcatatccgcccctccttttttgcttcagtataacagaggcgaattgcttttgactggtgataagccctatactataatgagaatgttacgcacaggaaaacagaggtgaagaccgtgttagaccgtttacagtcaattgaacaacgatacgaaaaattaaatgagcttttaagtgatccggaagtggtcaacgatccgaaaaagcttagagaatattcgaaagagcaatctgatatacaagaaaccgttgaagtctatagacaatacagagacgcatcagaacagcttgccgatgcgaaagcgatgcttgaggaaaagcttgatgccgatatgagagaaatggtgaaggaagaaatctccgaactgcagggagagacggaaaccttatcagagcgtttgaaagtgctcctcatcccgaaagacccgaacgatgacaaaaacgtaatcatggagatccgcggagcagcgggaggagaagaagccgcgctgtttgcgggaaatctctacagaatgtactcccgttacgctgaaatccaaggctggaagactgaagtcatggaagcaaacgtgaccggaacgggcggttacaaagaaatcatctttatgattacgggaaaaggcgcatactccaagctgaagtatgaaaatggcgcgcaccgcgtacagcgtgtgccggaaacggaatcaggcggccgtattcatacatccacggcgacggtggcgtgtcttcctgaagcggaagaagtagaagtggacatccacgaaaaagacatccgcgtcgatacattcgcatcaagcggaccgggcggacaaagcgtaaatacgacgatgtcggccgtacgcctgacgcatttaccgaccggtgtcgtcgtatcctgtcaggatgaaaaatctcagattaaaaataaagaaaaagcgatgaaggtgctccgcgccagaatctatgacaaattccagcaggaagctcaggctgaatatgatcagacccgtaaatcagccgtcggatcaggcgaccgttccgagcgtatccgcacatacaatttcccgcaaaaccgtgtgacggatcaccgtatcggcctgacgattcaaaagctggatcaaatcctggaaggcaagcttgatgaagtggttgaagcgttaatcgtagaagaccagtcaagcaagctccagcaggcggaaaattaagatgaagaccgtttttgaagccctaagctgggcttcttcttatttaaccgaagcgggaagagaaaaaaacgcggccgagctgctgctgttaaatgataccggaatggatcggagcaagcttctcgcaagtctgcaggagcccgtcggcgaggacgagctttaccgattcagacggcatgtggaaatgcataaagaaggcgttccgattcaatatattatcgggaaagaacagttttacggcagagaattctttgtgaatgacgatgttctcattccgcgtccggaaacggaagaagtcgtctttcatctgctggacagacagaagcgggtgttttctgagggagaacgcctgaacgtcattgatatcggtacggggagcggagccattgcggtgacgctcgcgcttgaatgcggacatttttcagtatcggcttcggacatttcaaaagaagcgcttcaggtggcggaaagaaatgcgcaaaacctcggagcggacgtccgctttttgcagggagatctgttaactccttttatttcatcaggaataaaagcggatattattgtttccaatccgccgtatatttctgaagaagaaatggcggatttgtcggatatcgtccgtttccatgagccgcttcatgcacttacggacggcggtgacggtttgaaattctacaagcggtttatggaggagctgcctcttgtcatgaaagataaagcgcttgtcgtctttgaaatcggatataatcagggaaaagccgtgaaagacctgttccgtcattcctttccgaatgcggaagtggaagtcgtacaggacatcaacggaaaagacagaaccgtatccgcggtcatcacatcatgaaaaaagcccgccggtgacgcacacggcgggcttttgttacaatggaaagaaaatgaaaggggcatccgccttgaaaaaagcgttcgccttcggatgtatactcgccgccgcagcttatgcggctggatttgtcctgccgtttggctttgacatcattctcggcgccgttacggctgttcttatcgtcgcagcggtcatcgtttccgggctggccgtaagcggagcggagcagcgggccaattatcattctgaaacagaagaaggacggcgcgcccgtttaaagatggccgccgttttcttttgcgccgctctcccttcagccggctgtctgctgattacgcttctgtagccggattttgtctttgcagcaatacggaatcccatacccaatagacgacggctgttaaaaccgcaaagatataaaaggctgaattagaaaacagagattggcctgacggctgcaaaagaccgaagatgatcccgtttgcaatgaacgacacccccaaataataaagaaaatacagcggatgaaatctcttcggctttttattcagaaagtattgaagcggcagcgcaaaaatcaaataaggaaacaaaaaataaaacgccatcgaaatgaaagccgcgataatgaattgatgaacatacaaaatagaataaatgacagacatacatgccgccgacagcagcacggtgtaattatatttcatctgaaaacctcctatcaaaataatatcgtaccatattttgaatctgtcaatgcagattatcagcttgctagatttttttcttcccgccggtttaaaccttttccgtcatgtccataatgggactagataaaaaaagcacggagaggaacggtggggaccgatgaaacagacaatgatgatctgcatatatatttttcttttattatcaggagcgcttgcgggtttgacaaaagaagaaacggcgcgggcatcagccgatgagcccgtcgtcataccggatgaagcgatccggctcaggattttggccaacagtgataacgatgaggatcaaaagctcaagcgccagatcagagatgctgtaaacaagcaaatcacggactgggtgaaagatatcacttccattgaagaagcgcggcggctcattcgttcgaagcttcctgaaattaaagaaatcgccaaacaaacgatgaaagaaaagggtgcgcatcaatccgtttcagttcaattcaataaaatctcgtttccgacaaagctgtacggcaatatggtctatccggccggaaaatatgaagccattttaattacactcggcaatggcgagggcgccaactggtggtgcgtcttgtttccgccgctgtgcttccttgatttctcaaacggcgaagcggtgaaagatcaggaagacggcggacagaagcaggaagaaacgcagaaacagacagaaaaagtgctggatgacgtaaaagcaaaggccgataaagcgaagaaagaaaataaagatgacgatgataccgaagtgaagtttttcctcgtcgattggatttcagatctattttcctgaagcaaaaggcataaatccggattcgattcatagattggaagaaagagttgatcgaaacggagggaaatatatgttttatcagctgagagtggcaagagatcaagatacggaggcgctggaggcctttttgaaaaagtctgatacggcacatgcggaaatcgatcagcagatcagccggtttatcgtgctggaagacagcgaaaaaaagattgccgcctgtctcgggatcgaaaaattcagcggcggaaaagggcttctccgttcactcgtcatgtcggacaggctgaatcaaagccatatcgttacactgtttcaaagtatggatgtgctgtgcaaaaaacatgaaattcaagatgtctacttagtcgccaatcagccctcatctgctgagtttctgaatgtgatgggatttgaagcgtgcgccgatgcgcctgaggaactgtatacgtccgaacatttccgcaactcgttatgcacagaaggttcgtttttaatggtgaaaacctctgcctgatctaacttatacacaaggttatccacttattaaaaagtgttgtccacagtttgtggataacgcttgttttattaaaggacatcttttatactttcaaaaggaatacacgagagaaaataaagttttaccgctttaaaataaggagtttggttatacatgaaaacaagaagatggtttgtggattgttccgcagaattatccacaaccgatccccaaattacacaagccgcggaattgctccggcagaatgaggttgtggcttttccgacagaaaccgtttacggactgggcgctaacgctgaaaatacggaagccgtaacgaaaatatatgaggcgaaaggaaggccgagcgataacccgctgattgtgcatatatcccatatcagccagcttgatcgttttatcagccatattcctgagacggcgaaaaagcttatggagctattctggccgggggcgctgacccttgtcctgccgtgtaagcccggtgtgctgtcaccccgtgtcaccgcgggactggagacggtagcggtcagaatgcctgatcatccggcagcattagccctcatcagctcggccggactgccgatcgccgcgccgagcgccaatttatcaggaaaaccgagcccgacgaaggccgagcatgtagctcatgatttaaacggccgtattgccggtattgtggacggcggcgcgacgggaatcggagtggaatcaaccgttctgtcctgtacggggaaacagcccgtgctgcttcgtccgggcggcgtgacaaaagagcagattgaatccgccgccggtccggttcttgtggataaaggactgaccgaagaagatgaggttcctatttctcccggtatgaaatatacacattacgcgccttctgcgccgatggctattgccgacggcggcgcccggagaattcaagaactggcagacgcatataaaagccggggaaaacgaatcggcattttgacaacagaagagaacgccgatagttaccaggctgattatatcaaggtctgcggcagacgcgccgaccttgaaacagtggcgtccgccttatacgatgcgctccgcagctttgatgaagcggaagtggatatgattatttctgagtcctttccggataccggagtggggctcgccgttatgaacaggctgatgaaagccgcaggcggcaccgttatccattaacttgttctaccccttatcggacatgcataagctaaacaagcgggcacgtccaagggggtttttattcatgtcgaatctattcatcggggaacttgtctccttaagcatcatggcatttgctttggggacggatgccttttccgtcgggctcggaatgggaatgattcagctgaagaaaaaacagatttttcatataggggttgtcatcgggctgtttcatgtcatgatgccgcttgtaggaatggcggccgggcatctgctgtccggttttctggggatgctcgccgtttacatcggcggatctcttcttttcattttaggggtgcagatgatgatcgccgcgtttaaacaatcggacgggccgctcatatctccggcaggctcgggactgttgctgtttgcggtcggtgtcagtctggacagcttttctgtcgggctcagtctcgggatgaacggctccaatccgtttctggccgttacgctgttcggggtcttcagcaccgttttaacatgggcgggccttttggcgggaagaaaggtgcagtcatggctcggctcctacagcgaagcgcttggcggagccattttgatcggattcgggctgaaactgcttttaccgatataagatacgtaaaaaaagaaacgaagatgccgtttcttttttcttcatttataataggtagtaagaggtgacggacatgaaaataatctttgtttgtacaggcaatacgtgccgcagtcccatggctgaggctctttttaaatccatagcagaaacgaaagggctggatgtcagcgtaagctcggccggcgtattcgcgtctccgcacggaaaagcgtcggctcatgccgtagaagcgctgtttgaaaaacggatcgccctcaatcacagttcatctcccttatcggaagaacatatcgagacggccgatctggtgctggcgatgaccgaacagcataaacagctgattgaaggccgatatcaaaacagtcagggcaaagtttttaccattaaagaatacgtgacgggggaaagcggcgatatctctgacccgttcggcggtccgcttgatgtttataaacagacgcgggacgaactggaggagctgctgacccttttggctgatcaattgcttgacgggaaaagcaagtaatctgtcagaaaatctgcaaacaggtcatttgcaaaacgaatgtgaaagagtagaatgaaatcaacggatttcgtaataaaaaggacaagcacactgggctgtcttcgcccagccacacctaggaggtaaatgaatgaaagtagctattgcgtcagatcacggcggcgtccatatccgcgaagaaataaaaagtcttttggatgaattgcagattgaatacattgatatgggctgtgaatgcggcgccggctctgtcgattattcagactacgcttttccggtagcggaaaaagtggtgaacggcgaagctgacaggggaattttaatttgcggcacaggcatcggcatgagcatctccgcaaataaggtaaagggcatacgctgtgcgcttgcccatgacaccttcagcgcaaaagcgacgcgtgaacacaatgacacgaatgttcttgcgatgggcgaacgcgtcatcggcccggggctggcgcgcgaaatcgcaaaagtctggctgacgactgaatttacgggcggccgccacgaacggcggatcggcaaaatcgcagattacgaagaaaaaaatctgtaagaggtgctggacaatggaagagatgaagcaaaaatggacggacatgctgactgagtttcaagagcaggcaggactgacggacggcagtctgctggtggtcgggtgcagtacaagtgaagccgccggaagccggatcggcaccgccggaagcggggattgggctgaattgatatacggcggacttaaccggtttaaggaaaaaacgggtgtgcatcttgcttttcaatgctgcgagcatttaaacagggcgcttgtcattgaagcggaaacggccgagcggttcaggctccccattgtttcagccgtccccgtcccgaaagcgggcggagcgatggcctcttatgcataccggcagatgcgttctccagtgctcgctgaatcgattcaggctgacgccgggattgacatcggtgatacgttcatcggcatgcatctgaaacccgttgccgtccctgtccggatatcgagccgtgagcttggagaagcacatgtgacgatggcccggacaagaccgaagctgataggcggaattcgcgccgtatatgaatgcgaatgatgaaaatacttttcctctataatgttcgtgttttctaattaaattttgtgatttttttaaataagctgttacattcacctgaaaaaccatgtacaataaggtggtaaaaataaagaacaggaaacggataggagaggatctcgctgatgaaacatttacctgtacaagataaacaagtgtttaacgccatcaaagatgagcgtaagcgtcaacagactaagatcgaattaattgcttctgaaaacttcgtgacggaagcggtaatggaagcacaaggctctgttttaacaaacaaatatgctgaaggctaccccggcaaacgctactacggcggctgtgagcatgttgatgtcgttgaggacatcgcccgcgaccgcgcgaaagagattttcggagctgagcatgtaaacgttcagccgcactcaggcgctcaggcgaacatggctgtttacttcacgattttagagcacggcgacacggtgctcgggatgaacctctcccacggcggccacttaacacacggaagcccggttaatttcagcggcgttcaatacaactttgtagaatacggtgtcgataaagacacgcaatatatagattatgaagatgtgcgtgaaaaagcgctggcgcataagccgaaactcatcgttgccggagcgagcgcatacccccgcacgatcgactttaaaaaattccgtgaaatcgctgatgaagtcggcgcttacttcatggtagacatggcgcatatcgcgggtcttgtcgcagccggccttcatccgaatccggttccttacgctgactttgtaacgacaacgactcacaaaacacttcgcggaccccgcggaggaatgatcctttgccgtgaagagttcggcaagaagattgataaatccattttcccgggaatccaaggcggaccgcttatgcatgtcatcgcggcaaaagccgtttctttcggagaagtgcttgaagatgatttcaaaacatatgcgcaaaacgtcatctcgaacgcgaagcgcctggctgagtctctgaacaaagagggtattcagctcgtatcaggcggaacggataaccaccttgtgcttgtcgacctccgttctctcggactgaccggaaaagtcgctgaacacgttcttgatgaaatcggcattacatctaataaaaacgcgatcccttacgatccggaaaaaccgttcgtcacaagcggaatccgtctcggtacggcggctgtgacaagccgcggctttgacggtgacgcgcttgaagaagtcggcgccatcatcggcctcgcgctgaaaaatcatgaagacgaagcaaaacttgaagaagcgaaacagcgcgtatctgccttgactgaaaagtttcctttatataaagaactggactattaataaggaagaaacccgccggaaccttaatccggcgggtttttttatgattttcttgaaactgtttgtctttttctgtagaatcaatagaagtgtgaaaaagtcactcggacaacaaaaaaggagctgaacacagtatgggaaaggtttacgtatttgatcatcctttaatccagcataagctgacatatattcggaatgaaaatacaggcacaaaggatttcagagaccttgtggatgaagtcgcatcactgatggcgtttgaaattacacgtgatcttcctcttaaagaagtggaagtgaaaacacctgttcaaacagcgacatccaaagtgatttcagggaagaaactcggtatcgtgccgatcctgagagcgggtctcggaatggttgacggcatgctgaaattaatcccggccgctaaagtgggacatgtcggattataccgtgatccggaaaccttaaaaccggtggaatactatgtcaagcttccttctgatgtagaagaacgcgaatttattgtcgtggatccgatgcttgctacgggaggctctgcggtggaagcgatcaacagcctgaaaaagcgcggcgcgagaaacattcgttttatgtgtcttgtagcggctccggaaggcgtggaagagctgcagaaacatcattctgacgttgatatttatatcgccgcccttgatgaaaaactgaatgaaaaaggctatatcgttccgggcctcggtgacgcgggtgacagactgtacggaaccaaataaatcggaaaacctcattcaggggttttcttttttttatccagattttagctgaatgggcagaggtcatacatttataggtgaatttgtgaacattctgtgtatgcttccggtataaaaagttttttaactttaaacagattgacacatgttaggggctattgtatgctaaacgagggtattatgagaaggttttcattcctttcatttctagtatccatcctcattttaaatcctccaaaaaaacccgttatatgaggatttatctaagcgaatgaaacagcatcccgtagcatcaggaggatgagtggttttttcgaacaggccgttttgcggacaaaaaaggccttctgcaagggttaaccgcatgttttgccgtatccaggaattatattacattttcatcaggagacagatagttgatggacgatcccaatcttacattcagcagacaacggagatatgtatttgtaatcttagcaatctatttgctgggatatggtcttacggcgtataaaactgtttttttaggcctctttttgggaactgttttcagtttgtttaatttgtggctcttgaccagaagaatgaatgcttttgacaaggccgtggcgaaaggaaagtccatacgatcactcgggagcgcagcgcgttggtgcaatgcgatacttgcgatggctgtcgcctttaaatatcccgataaagtcagtgtggcaagtgtgattattggattaatgacaatttatcccgtcattatgatagattccattattcagctcaaacgttcatcaatggaagagaggtgaaaacccattgaatcacgattacagaactattgatttgtttggtcttacttttaatctgacaaacattctgatgattactgtggcaagtgtgattgtgctgctgattgcgattcttactacaagaacgctgtccatccgtccgggaaaagcccagaacttcatggaatggattgttgattttgtccgcaatattataggcagtacaatggatttaaaaacaggggctaacttcttggcgcttggtgtaaccttgctgatgtacatatttgtatcaaatatgctagggctgccgttttctgtaacggtcggacacgagctttggtggaaatcaccgacggctgatccggctattactctgactctagccgttatggttgtgtcgttaacgcactattacggcgtgaagatgaaaggtttgaaggaatactctaaggattacctcagaccggttccgcttatgttcccgatgaagatcattgaggagtttgcgaatacgctgacactcggacttcgtctttacggtaacattttcgccggggaaattcttcttggcctgcttgcgaatctggcgacgaatttctactcaaacagtttctttctcggtttggtcggcacagtcggagccattattccgatgcttgcatggcaggcattcagcttgttcatcggtaccatccaggcatttatctttacgatgctgacgatggtgtacatgtcacacaaaatcagtcatgatcattaaaatcatatatccattcggataacattttaaaggaggaactttttcatgaatttaatagcagctgcaattgcaatcggtttaggtgcacttggtgcaggtattggtaacggtctgatcgtttcacgtacggtagagggaatcgcccgtcagccggaagcaggaaaagaacttagaactcttatgttcatgggtatcgcattggttgaggcccttccgattatcgctgtcgttatcgcgttcttagcgttctttggctaagcaaaaaagccttatatgaactaaaaatggcgaagatcactctaagagaaccttcgccattgctttatgtctgataagcaggccgtcccgaaacggctttttatcagcagagaaaacctgcagaagggagttgccgtagtagatgtctcaattacctcttgaattaggactgtcgtttaacggcggagatatcctattccaattgttagctatgttagttttattagcgcttctcaagaaattcgctctgggaccgctattaaatataatgaaacagcgtgaagatcatatcgccggcgaaattacgtccgctgaagaaagaaataaagaagcgcagaagctgattgaagagcagcgcgttcttttaaaagaagcgaaacaggaatcacaatcactcattgaaaatgcgaaaaaactgggtgaaaagcagaaggaagacattatccaggctgcacgcgccgagtctgaaagattgaaagaagcggcgagaaccgaaattgtcaaagaaaaagaacaagcggtttccgcacttcgcgagcaagtcgcatcactttctgtcttaatcgcatcgaaagtgattgaaaaagagcttgatgaacaagcccaggaacaactgattcaggactatcttaaagaggtaggagaaagccgatgagtggatctgctgtctctaaacgatacgcgtcagcgcttttcgacattgccgttgagacttctcaaatcaatgaaatcgaagaagagcttaccgtactaaaagaagtgttccgaaacgaagccggattacaggaagtgctaagccatccgaaggtatcggccgctaagaaaaaagagctgattcagcaatcgttcggcgcactgtctgagtctgtgctgcatacgatttttcttctgattgaccgccgccggtcttcgattgtgcctgatctcacagacgagtttatcaaacttgccaatcaggcccgtcagacagaggacgcggttgtttattcagtaaagccgctttcagaagcggaaatgttatcattgtctcaagtgtttgcaaaaaaagccggaatcgcttcgctcagaatcagaaatgaagtgcagacggatttaataggcggcattaaagtccgcattggaaaccggatttatgacggaagcgtaagcggaaagcttgagcgcatggaacgtcaacttgccggaggaaatcgatagaaggggtgaaacctaagtgagcatcaaagctgaagagattagcacgctgataaagcagcaaattcaaaattaccaatctgaaattgaagttcatgacgtaggtacagtcatccaagtcggagacggtattgcgcgtgtacacggccttgacaattgtatggccggtgaacttgttgagttttcaaacggcgttttgggtatggctcaaaaccttgaagaatccaacgtaggtatcgttatcttaggaccttacagagatatccgcgaaggtgatgaggtcaaaagaacgggccgcatcatggaagttcctgtaggtgaagaattaatcggacgtatcgtcaacccgctcggacagccggtagacggactgggtccgattctgacaagcaaaacacgtccgatcgaaagccaggctccaggcgtaatggaccgtaaatcggtacatgagccgctgcaaacgggtatcaaagcgatcgacgcgttaattccgatcggccgcggacagcgtgaactgattatcggggatcgtcagacaggtaaaacatctgttgcgattgatacaatcttaaaccaaaaagatcaagacatgatctgtgtgtacgtagcgatcggccaaaaagaatctacagtacgcggcgtggtggaaacacttcgtaagcacggcgcgcttgattacacgattgtcgtgacggcatccgcttcacagccggctccgcttctttaccttgcaccgtatgcaggggtgacaatgggtgaagaattcatgtacaacggcaagcacgttctcgtcgtatatgatgatttatccaaacaagcggccgcttaccgtgagctgtcattgcttcttcgccgtccgccgggccgtgaagcattccctggggatgtattctatcttcactcccgtctgcttgagcgcgcagccaagctgagtgacgctaaaggcgcaggatcaattacggcgctgccgttcgtcgaaacacaagcaggagatatctccgcttatatcccgacaaacgtcatttccattactgacggacagattttccttcaatccgatctattcttctcaggcgtgcgtcctgcgatcaatgccggattatccgtatcccgtgtcggcgggtcagcccaaatcaaagcgatgaaaaaggtagctggaacattgcgtcttgaccttgcttcataccgtgaacttgaagcattcgcccaattcggatctgatcttgaccaggcgactcaggcgaaattgaaccgcggtgcgcgtacagttgaagtgctgaagcaagacttgaataagccgcttccggttgaaaaacaggtagccattctttatgcgctgacaaaaggatatcttgatgatattccggttgcggatatcagacgttttgaagaagagtactacatgtaccttgatcaaaaccataaagatctgcttgacggcattgcgaaaacaggaaaccttcctgctgatgaagacttcaaagctgcaatcgaaggcttcaaacgcacatttgcaccaagcaactaacccttagaagatgagagaaaaaggttctctttttctctctttttacgcaaatgaagaataaaggtggtgaaatctttggcctcattacgcgatattaagtcaaggatcacgtcaacgaaaaaaacaagccagattacaaaagccatgcagatggtatccgctgcgaagctgaaccgtgcggaaaccaacgcgaagtcatttgctccgtatatggataagatccaggaggttgtgtttaacgtcggaaaaggcgcgaaaaacgcgaaacacccgatgcttgtctcaagagaagtgaaaaagacggcgtatctcgtcattacgtctgaccgcgggcttgcgggtgcgtttaacagttcggttttgcgaaacgcttaccgcaccattcaagaacgccatcagtctaaagatgaatacacggtgattgcaatcggcagagtcggccgcgatttcttcaaaaaacgggagatgccgattttgtctgagttagtggggcttggcgacgaggtcacttttgctcagattaaagatttgacccgtcagacggttcaaatgtttatcgacggcgcttttgatgaactgcatttggtgtataaccatttcgtcagtgcgatttcacaggaagtgacggagaaaaaagtgctgcctttaacggatttcggaacgagcggcgggaagcgcacggcttcttacgagttcgaaccggatgaagaagaggtgctcgaagtgctgcttcctcaatatgcggaaagcttaatttacggcgcgcttcttgacagtaaagcaagtgaacacgctgcgagaatgacagcaatgaaaaatgcgactgataatgcgaaagaactcattgattcactttcgctttcatataaccgcgcgcgtcaagcggcgattacacaagaaattaccgaaattgtcggcggtgcagccgctttagaatagaaagattttgtcaggagggatagcgatgaagaaaggacgcgtaagtcaggtgcttggaccggttgtcgacgtacgtttcgaggacggccacttgcctgcgatttataatgcgattaaagtttcacagccagctacaggcgaaaatgaagtaggcatcgacctaacgctagaggttgctcttcatttaggcgatgatacagtccgtacaattgccatggcatctacggacggaattcagcgcggaatggaagccgttgatacaggtgcgccgatttccgttccagtcggtgatgtgactctcggacgcgtatttaacgtactgggagataaaattgatttaaatgaaccgctgcctgcggatgctcaaaaggacccgatccacagatcagctccttcattcgatgagctttcaactgaggttgaaattcttgaaacggggattaaggttgttgacctgctcgctccttacatcaagggcggtaaaatcggattgttcggcggcgccggcgtaggtaaaaccgtattaatccaggaattaatcaacaacatcgcgcaagagcacggcggtatttccgtattcgccggtgtaggagagcgtactcgtgaagggaacgaccttttctacgaaatgagcgattcaggcgttatcaagaaaacagccatggtcttcggacagatgaacgagccgccgggcgcacgtatgcgtgtagcactgacgggtcttacaatggctgagcatttccgtgataaacaaggacaggacgtactgttctttatcgataacattttccgtttcacacaagcgggttcagaggtttccgcgcttctcggccgtatgccttctgcggttggttatcagccgacgcttgcgacagaaatgggtcagcttcaagagcgtattacgtctacaaacgttggttcagttacatctatccaggcgatctacgtgcctgccgatgactacactgacccggctccggcgacaacgttcgctcacttggatgcaacgactaaccttgagcgtaaattaactgaaatgggtatctaccctgcggttgatccgctggcttccacttcccgcgcgcttgctccggaaattgtcggagaagagcattatgcggtggcgcgtgaagttcagtcaacgcttcagcgttacaaagaacttcaggatattatcgcgattctcggtatggacgaattaggtgaagaagacaagcttgtcgttcaccgcgcacgccgtatccagttcttcctttctcaaaacttccacgtagctgagcagtttacgggacaaaagggttcttacgtgcctgttaaagaaacggtacgaggctttaaagaaatcctttccggtaaatatgaccatcttccggaagatgcattccgtcttgtgggacgcattgaagaagtcattgagaatgcaaaagagatgggtgtagaagtttaatctggtcctaggagggtaaaagcatgaagaccgttaaagtcaatatcgttactcccgacggcccagtatatgatgctgatattgaaatggtgagtgtaagagccgagagcggtgatctcggtatcctgcctggccatattccgaccgtggctccgcttaaaatcggcgctgtccgccttaaaaaagacgggcagaccgaattggcggctgtcagcggcggatttttagaagtccgtcctgatcaggtcactatccttgcacaagccgctgaaacagcggaaagcattgataaagagcgcgcccttgctgcgaaaaagcgggcggaagaccgtttgaacaaacgatcagatgatactgacattcgtcgggctgagcttgcgttacagcgggctgtaaacagattggatgttgcaggaaactaaaaaagaatccttctcggctgtctgagaaggattctttttctatattaacgcataagagattcatagacgccgataagcggatgatcctcttctttttgcagatataaatgttcgcagcagttgtcggtgtgccacgttttgtttcctctccgcacacccgtcgtataagcgccgtccgtatacggataaggtttgacgacccattcggcatcgtcatgatgtctgatggcgcaatcgatgacatacacactgagcattttctcaaattcgtcaatcggcaggttccaatccgccaaaagcagctcttttatgctgcggaagtaaagagcttccactgccagcaggctgccgggtgaataatcaagagaaatgttgaaaaactgacataattctttcagttcctctgtttgagactgtctataatcatagtagaatgctatcgcttcccactcgtggtcaaatacgggaagtgtttctccatactgcttttccggatgaaaaaaggaatgattcatattcccatctcctttccaaaaaagtatatcatgccggagaacggacatttaagcggggattgcccctaattttggataaaaattctgatgtaaaaatgatcatctttctctcttcttcttatataataagagaggatatgaggggcggaaaaaatgaaaggagatggaatttgtgaatgtattggggcagcaggccgcaatcagcatcctggttcacctggtatgcattgcggtgacatggtgggcgcttcaggccgtcaactttgatccgctgatccgaaaaggaaaaatagtgcaggcgaggctgctgatcattcttcttaccattgcgatcggtacggcagtcgccaacttctttttagattatcttacctattcgaaacagcttccatacttattttaagatgtttcgtctgttgaaatgaagggaatcgctgggtgagaaaccaatttttcttcacccgcttggcgagttttgacgaagttttccatgtattgctttccccggctccggcaaaaatgggagtaagggggagagatcgatatgaagaaaaaaagagcaggccgtatcatcttgttttttgtttttttaagcgccttaatagcggtatttcattccattcatgcaagtgagctgtctccgcttgcccagattgccgaaggaatggagcggcagcaggtcactgtggatgaatggacgcttcatgcgaaaaaaaatctgaacctgtcactgagtgaatttgatgacaaggtaaaagaactgaagacgcagtatccgcaatatcattgggaatccgcgcgggaagataaaatcgtaaaggccgtcggcacgtattctgacaaaaaaaatcacacaacttttaaactgcagctcgtcactaccctcaaaaaccagaacccaacttcgtatttattatatgagcaaatgagcccggagcaaccggaaaactggaatgatacatatgaacagtttgaacggcaggcacatgacatatttcaaaataaagtatttatttttacttgtctaaagggtcatttaaatgataatatgagtattgttttgcaaaaaaaagcagaacagctcatgaaagaatttgaagcaagtccagttgaacatgtagttgagcctcatttcgtttctgtttctgcatttacatataagtggacagattacatcatgacatcgaaacataagatgaatgtgcaagttgcgcttagaagtgcgggaatgggcggaaaacataccgttacggttggcacaccaatcgtgacaactgaatattaatatagagaatatagggacgcggaggggaataccttggaaaaaatcatcgtccgcggcggtcagaagttaaacggcacagtgaaagttgaaggagcaaaaaatgccgttttaccagttatcgctgcatctttattagcaagtgaagaaaaaagcgtaatatgtgatgtacctacgctctccgatgtatatacaattaatgaagtgttgcgtcatttaggagcagatgtgcattttgagaataatgaagttaccgtaaacgcttcttacgctttagaaacagaagcaccttttgaatatgtgcgcaaaatgcgcgcgtcagtgcttgttatgggccctctgttagctcgtacgggtcattcaagagtagcgcttccgggcggttgcgcaatcggctcaagaccgattgatcagcatttaaaaggctttgaagcaatgggtgcaaaaatcaaagtaggcaacggctttattgaagcagaagtggaaggccgtctgcagggcgcaaaaatctatttagatttcccaagtgtgggtgcgacagaaaacttgattatggcagctgctttagctgaaggaacaacaacgcttgaaaacgtggcaaaagagcctgaaatcgttgacttagcgaactatatcaatgcgatgggcggaaaaatccgcggagccggcacaggcaccattaaaattgaaggtgtcgagaagcttcgcggcgtaagacacaacatcattcctgaccgtattgaagcgggtactttcatggtggctgcggctatcacggaaggaaatgtattagtcaaaggtgcggttcctgagcatcttacgtctttaattgcgaaaatggaagaaatgggagtcaaaattacggatgaaggagaaggccttcgtgtcatcggtcctgcccagctgaagccgatcgacattaaaacgatgcctcacccaggattcccgactgatatgcagtcgcaaatgatggcgctgcttctccgtgcgagcggaacaagcatgattactgaaactgtgtttgaaaaccgttttatgcatgctgaagaattccgccggatgaatggcgacattaaaattgaaggacgttctgtgatcattaacggtcctgtacagctgcaaggcgcagaagttgccgctacggacctgcgtgcgggcgcggcgctgattcttgcgggattagtggctgaaggtcatacacgcgtcacggaactgaagcacttggatcgcggttatgtgaatttccataaaaaacttgcggctctcggcgctgacatcgagcgtgtcgttgatgaaacggccgctgaacaagaaagcaaagaagtcgtaactgacctaaacgcataatggctgtaaaaacagtatgtcaatctggcatactgtttttttatggtttatcatcattattatgctctgattttcaaaaaagaatacgtttttcgcgtgaaaaatggaataagattctgtccaaaaggaagtcatattagcttgtccctgcccataagatgaagtagagtcgaatcccaagcaggaggcagctgatatatgaaaccgattgtatttctactatccgggctgtgtatacttattcttcttgttcccaccattctcgttcttccgtttcaggcggaaaaaggagcagccgtaaacagagagcccggacacaaaacaacacacaccacacgagaaacaaaaggagcagaaacattgaaagaatcacctgtatccattccggtttatcggacatccaatcattctgtagagaacattccgcttgaagagtacgtgatcggtgtcgtggcttccgaaatgcccgcaacctttaaaccggaagccttaaaagcccaggcgctcgccgcccggacattcatcgtcagattgatggttgctgactcagccgttcaggcgccgaaaggatcactggtggacgatacgcaaatgttccaagtctatcaaagcaaaagccagctgaaaaaagaatggggttctaagtacgcacacaacctcaagaaaatcacaaacgcggtcgcaggcacgcaaggaaagattttaacgtacgacaacaagccgattgaggcatctttcttctctacgagcaacgggtatacggaaaatgcggaagcctattggacaagcgccattccttatttaaagagcgtgaaaagtccgtgggataagcaatcgccgaaatatcttgccacccagaccttcagtgtgccggagtttcagcaaaagctcggcgtacagctctcgggacaaaacacggtagggcagattacagccagaacgccgggccatcaagtggcgacggccgtcataaacggcaaaaagctgaagggaagagacatccgggaaaaactcggactccgttctgccgactttgaatggaaacggaacggcggcagcatcaccattacgacaaaaggattcggccacggcgtcggcatgagccagtacggggccaattacatggcggagcaggggaaatccgtggcggacatcgtcaagcattattatcagggagtggacatatccgaagcagattcatttttaaacaaatatatggcgaaaaaataggcgctttcatgagcgtctgttttttttgaaaactattccataaacggtaaagcaaccaacagactcatataacgaaagcctaaaggctgacaaatgccgtctgaaggctgagcgccgggtgaaaatcactgataaaaatgccgtatctatgtgaatatacgcaaaaataatgaggaacgccgtcctatttatttcccttttcatctcatttacgataaatattgttcggcgttgaacgtaaatctattgaaaaggggaagaagcaatgaaaaaaacactttcactcataatcatgctcggattgatgctgactgctgcatctcctgcttttgctgccgagaatgcaaacgagaagacatttttatttaaaaacaatatcgccattctgcttgatgcgagcggcagtatggcgaaacggattgacggcgtttctaaatacaatatggcaaaagatgaaatcgtccgttttgcagatcgaattaagtctacatcacaggtcagaatgacggttttcggttcggaaggcaataataaaaactccggaaaagttcaatcttgtgaatccattcgcggtgtatacggattccaaaagtttgacagacagagcttcctcaactctctgaacggaatcgggcctacgggctggacaccgattgcaaaagcattagaagatgcgaaggcttcttttaacggcgttcataaattcggctttaaatccgtttacctgttgacggacggtgaggagacatgcggcggagatcctattaagacagcgaaagaacttcgcaaacatcatattaaagtcaacgtgatcggctttgactttaaagaaggcttcaacggacagcttcacgcaattgccggtgcgggcggaggaaaatattacgaagctcacagccaaaaggatatgaaccgcatctttacgatggaagcgagttcattagcgaaataagaaaaggtgccgtttagcggcccttttttttatttttatttaacaaaaatttcaagaaaagatgaagagaaaactgtaaaaagaatcagattccggacttatattacaaaaagggcgaaaaaggcattaaatctgtcatcatttatccaatctttttaggatgatgcgcataattctgttcatttttaacggcgtacagccgcttatacaaaaggaatcccgccctatatctttttgcatactcctcatctagcatagagaagagccgggggcccatcggccaaaaacaaacggagaggaatgaaggaaatgaaaaaaatgttcactgcggggattgtcggacttttgacgctttcactcggatcacctgtttttgcagctgagaaaaagcacgaagaaacaaacgtcgccgtgctgtttgacgcaagcgggagcatgatacaaaaaacagggggagagcgtaaaatagatgttgcgaaagagtctgtcacttcttttgcggaagttcttcctgaagacacgaatctgatgcttcgggtattcgggcataagggcaataataaaaactcaggcaaagccgtatcatgtaacgcgacagaaacgttatacggccttcagccgtacgccgtgactccatttgagcaatcactcagcaagattaaaccgaccggctggacaccgatagcgaaagcgctttctgatacacgtgaagaatttgagcgggccggcgctaaagggaaaaacgtcgtatatctgatcacagacggtgaagaaacatgcggcgggaatcctcaagccgaaattcaaaagctccgtaaagcgaatgtcaacacggtcgtcaatatcatcggcttcaacttcggcatgaaaggaagcgaaagccttgaaaaagcggcggaagcgggaggcggcacatacgtctcagctgacagcgcggacgagttcaaacaggcttgggaagacgccgcaaaggatttagcaaaagaataggttaaaaaaggacgcccgtgcggcgtctttttttgtttagaaaacggaaccgcgggaatgatacggataaaaggagatgaacgctgttgttaaaaggagcaggcattatattggtgctggcggcagtcgtttttgttctgatagggatttttctgaagcttgccgccttcatattcgtcagtatattggccattatcgccgcagttattttattcaccattctgagcagacatcatcgcaatgaaacatagagtccgaagagggctctttttttaaaccgcaaattcgacaaaatacagggattgtggaagaataaaagagaaggatactgcggaggggaaaacagtggatgaaaaaacaacagcggtaagagacatataccgctatgaaaaaggggtattaacaaagacggcagatcggatggtttcagagtatccgcttaccgtcatggtgaacgggcaggaatttgttacgctcgtctgcacgcctgaccatttagaggaactcgtcatcggatttctcgcatcagaaggcgtcattcgttttgaaaaagagatcaaaagctttactatagatgaaagtctcgggttcgcatatgttgaactgacgaatcccggagtgcttgagcaaaaagactatacgaagagggtcatcggttcatgctgcgggaaaggccgccatttttactttcagcaggatgtgaaaacggccaaaaccgccgtcagccggattaccataactcctgagacgtgccttcgcctgatgaaggagatgcaaagcggaagcggcaccttccgggaaacgggcggcgtccataatgcagcgctgtgcgatacggaaaagctgctcttgatgaggacggatatcgggcgccacaacgcgctggataagctgtacggctgctgtttgaaaaacggaatgcccgtccgtgacaagctgatcgtcttcagcggccggatttcctcagaggttttattaaaagccgcaaaaatcggcgtgtcgattgtcatttcaaaatcggcgccgacggagctcgcgctgcaaatggcggaagagctgaacatcaccgcgatcggttttgtcagaaacggatcatttaacgtatacacacatcctgaacgggttgaacaatagaaaggggtcttgggcttatgaatacagaaacgcgccgggtgacagacaaaaaggaaaggccgctcagggatcttcgtatctctgtaaccgaccgctgcaacttcagatgcacgtactgtatgccagccgaattattcggaccggattatccatttttacaaaagacggaattgctctccttcgaggagcttgagcggcttgcgaagctgtttgtcggccgcttcggcgttgaaaaaatcaggctgacgggcggagagccgctcatgagaaaagatatgcctgaattgatcaaaaaacttgcgcgcatcccaggacttaaagatatcgcgatgacgacaaacggctctctgcttcccgtgtatgcggaaaaactgaagcaggcggggctgcatcgagtgacagtcagcctcgattctttagaggatgagcggtttaaggccattaacggccgcggcgtttcggtgaacaaggtgcttgagggcattgaggcggcaaaagcggccggactcggtgtgaaaatcaatatggttgttcaaaagggcgtcaatgaaaaagatatcctgccgatggcccgctattttaaagaaaaaggtcatattctccggtttattgaatttatggatgtaggcaatacgaatcaatggaataaaaaagacgtgatcacgaaggccgaaattattgatctgatcaaccagcacatgccgacggagccgatagaagcgaattacaaaggagaggtcgcttccaggttccgctatcttgacggttccggcgaaatcggcgtgatttcctccgtctcggatgcattctgcgcctcctgcaacagagcgcgcctgtcggcgagaggcgagctgtttacgtgcctgtttgcgtcaagcggctatgatgttcggaaactcgtgcgcggcggtctgaccgatgatgaattgacggaatccatcgcttctgtctggagaaatcgcgcggatcagtattcaattgaccgcgcgctttctaaaacggatgggaaaaagaaagtggaaatgtcttatataggcggatgaagaaaagcttgcccggacaagggcaggcttttttattcacaatatgagagcggtctgttcaaaaaataccggtaacagccgaaatatatgataggaattttgatgcaggacaatcaagttatgcaattccaaagccatacaatatgttaaaatataaccaatagaaattagaaaaggttgtgaaaggggcatgaccgcatacgagattccgtcatctcaagttggagtcaagatcaacaaatggtacaagcacattttagcgtttcaagcggctgatgccataaagctgaaagaggaaattgatgaggatatacaacgtatggaggaagaccagctgctgctgttatattatcagctgatcagctaccgccatcatattatgcttgattacgtcaagccggaatgcaccgaacaatcacagattcagtacagcgagctgcaaaagacgatcgaaagcacggacagcatatcgggactgtctgagtattatttccatttgttcagagggatgtatgaattcgatcacaataactatgttgcggctatttctttttaccggaaagcggaaaaactcctttcatttgtcgaggatgatatagagagggcggaattccatttcaagatgtctgaagttttttacgtcatgaagcagactcatttttccatgaatcacgggattcaggcgctggatacgtatatgaaacacgatttttacagagtgcggagaattcaatgccatttcgtcatttcaggaaactacatcgactgcaaaaactacgacaaagcgcttgagcatttagacgaagccctccgcctttctttgcttgaaggacagccccgcctgatcgggtcttcgctttacaatctggggaattgttatgctgaaaagcgggatctggatgaagcggcccggtactttagaaaagcggttcccgtttttgaagagcatcagcttgaacagcttccgaaggcgctgttcagcttaacgcacacccttttcaggctgcatgatgaccaagcggcccttacctattatgaaagagggatcatgatcgcgaaagaacgcggcgaccgattcagtttagagaagtataagtttttacaagcgctttatttggagtcactcaatatggatttaatccatgaagtgtttgactatatgaatgaaaaatcgctgtatgtgtatattgaagatttcgccttggaggccgccgtttacacaagcgcacatgagcaatataaagaagcggcgtatttttatgaaaaagcgattcgcatgagagaaaaaattcaaaaagaacagtgtttatacgatatataatttttgttaaccatctgatcagcagatggttatttttttatgcacatcaggacgtttgatcatagaaaaaatcggaaaaatcgcaaaagagggaaaaaagtacgatgggaaggagggatttgttgttcggatttaatgatatgataaagtttttcgtttcatttctcatcattctcccgatggtgtctgtcatccatgtgtcgggacacagctttatggccatgctgttcggaggcaaggcgtcgttggatatcggaatggggaaacgtcttttaaaagtagggccgattcaggttcggcgtatctacttcatagattctttctgcaagttcggcgaattgcggatagataaccgtctgacgagcgcgctcgtctattccggaggctgtctgtttaatctcgcttctatctttttaataaatctgctgatcataaaagatttcctagagccaaacttatttttttaccaatttgtctatttttcaacttattatgttttctttgctcttctgcccgtgcaatacggggataataagctgtcagacggattggccgtttacaaagtgatccgctacggggaacgctgtgaaatcaataattgagagttgaaatgtttgctatcaggctgaaagggaagaaaacaagtacacaaaaacaaaaggagctgaagagatcatgagtgaagataacggtttaaaagacaaagtaaaaggcggcatgaacaaaataaaaggggaagcaaaggacaaagcaggcgacatggcaaacaagtccgacttaaaagcggaagggaaaaaagacaaagcgaaaggcagcctgcaaaagggtgtcggtaaaacgaaagataaactcagtgatgattaatttgatcgtgaaacacagcaaaagcccaaaatattttgggctttttgttatgagaaatgacaaaaattccagttcgtttggttaatattcactaaatttttaaatattctataaattccccggcgatttctttataatattcacaaagaatgtaacctttcttcacatttaattaaacgtttgttgaagaaaaaaatgagaaatcggtcatttctgcaaaaggaatcgggccgttcactgtcgaataacttttatcacttaacatttcatgaggtgaagggggtgacggccgcctgcatcgtttcggtatgaccatgcggattgtgtttgactatcactaagggggaatacagatgaaactgacaccggttgaacaagaaaaattgcttatttttacggcgggagagctcgctaagcagcggaaggcgcgcggcgttctgctgaattatcccgaagccgccgcatatttgacctgttatctgatggaaggcgcgagagacggaaaaagcgttgctgagctgatggaatccggccgcaatgtattgacggaaaaagacgttatggaaggcgttgcggaaatgctggacagcattcaggtggaagcgacgttcccggacggggttaagcttgtcaccgttcatcagccgatcaaagcggaggtgaagtcatgaagccgggagcgattcaagtcgcaaaggggaccatcaccattaacgaaggccggaagacgctggaggtgtcagtcaccaataacggaacacggtcagtgcaggtcggatcgcattttcattttgccgaagccaacggcgccctttccttcaatcgggacaaagccatcggcatgcgccttgatatcccgtcaggcacatctgtccgttttgaaccgggagaagagaaaaccgtcacgctcgtggaaatcggagggcgaaaaacggtcagaggcctcaacggcatggccgatacgtatatggatgagcggggaaaagagaagacgctgtcaaatcttaaaaaagccggatggatggaggaggcgatccgatgaaaatgtcacgtgagcaatacgcagaactgttcggaccgacaacgggagacaaagtcagactcggagatacggatttatggattgaagtcgaaaaagatttcacgaattacggggaagaaatgattttcggcggagggaaaacaatccgggacggcatggggcagaacgggcgtatcaccgggaaagacggagcgcttgatctggtcattacaaacgccgtcatcctggattataccggaatcgtcaaggcggatatcggggtgaaggacggccggattgtcggcgtcgggaaaagcggcaaccctgatatgatggatggggtggacccgcacatgattatcggtgccggaacagaagtcatttccggcgaagggaaaatcgtaacggccggcggggtggatacgcatatccactttatctgcccgcagcagatggaagtcgcgctttcttcaggcgtgactacgcttctcggcggcggaacaggtcctgcgacgggaagtaaagcgacgacttgtacatccggtgtatggtacatgtcgagaatgctggaagcggccgaggagtttccgatcaatgtcggtttcttaggaaaaggaaatgcatccgataaagcgccgctgatcgagcaggtggaagcaggcgcaatcggcctgaagctgcatgaagattggggatcaacgccaagcgccattaaagcttgcatggaagcagcggatgaggcggacattcaggtggcgatccacacagacacgataaatgaagcgggctttttagaaaatacgcttgatgcgatcggcgaccgggttatccatacatatcacatagagggagccggcggaggccatgcaccggatattatgaaactcgcatcttacgccaatatcctgccgtcctctacgacgccgacgattccatataccgtcaacacgatggacgagcatcttgatatgatgatggtctgccatcatttagattcaaaagtgcctgaagacgtggcgttcagtcattcacgcatcagagcggccaccattgcggcggaggatattctgcacgatatcggcgcgatcagcatgacgtcatctgactcgcaggcgatgggcagggtgggagaagtgattatccggacatggcaggtggccgataaaatgaaaaaacagcgcggcgctctatcgggagaaaacagcaatgacaatgtgcgcgccaaacgctatatcgccaaatacacgatcaacccggctgtcactcacggtctgagccatgaagtcggttccgttgaaaaaggaaagctcgccgacctcgtactatgggacccggttttcttcggcgtcaaacctgaacttgtgctcaaaggcggcatgattgcccgcgcccagatgggagatccgaatgcttccattccgacgcctgagcccgtgtttatgcggcagatgtacgcatcatacggtaaagcaaaccgcaatacctctattacatttatgtcccaggccggtatcgcaaacggtgtgccggaaaagctcggccttgaaaaaatgatttctcccgtacggaatatccgtaagctgagtaagctcgacatgaagctgaatgacgcgatgccgaatatacatgtcgatccgaaaacctatcaggtgttcgccgacggagaagagctggcatgccagcccgtcagctatgttccgctaggacagcgttatttcttattttaatccctctccggccggtttcccgccggcctgtttaccctctattgccaacttgatttcatcctgccgcccgttttagtgtatattagtagttgacaaacaaatgaaatgtaactattttggttacaatggtggtgaaaaacatgattaacagccgtcttgctgtggccattcacattttatcgctgatctcaacggatgaacgggcgtcatcggacatgattgcgggcagcgtaaacaccaatcccgtcgtagtgcggagaacgatcagccagctgaaaaaagcgggtattctgacatcccgggcgggtgttccgggagccagcctgaaaaaagatccgtcggagatcaccctcttagaggtttacagggcggtgcagaataaggaagagctttttgcggttcacgacaatccgaatcccgactgtccggtcggcaaaaatattcagcgcgcgctcgatgagacgttcggaagcgtacagcgggcaatggagaatgaacttgcgagcaagtccctttatgatgtaatgaatcatctcttttgttaaaaagagatgggttcatgccgctagacgtgtaacggaaatggttacaatgggtaatgaggaaatcacggttttggctccatattcagacaagcctggatgcgggattgcgatctgtttaatgaagaaaacctccgaaactaaaggaggtggtaaccgggatatttttattttgcttaaggcttatgtgaaggtgtctgttgtaagcgggttaccaaaaaaagacggaactcttattttaatacgcgctaaaaaaactgatggagaatatcctgcctccggtaatgccaaaaccgttcgcctcttcacaatcattataaaatttctcaaggaacgatcagcagcccgttagctgcccctcattagagatgagctgttaccacactgttacattagaacttccgctgcttttatatccttctgtcgctaagacttgataagcccaattactgcccagattcattccatggctcttccatgcgttaacatgattgctgaaagtgattgcagcgttgcttccggtcggtctcttcgactggcggacactccagtactgcgtaaaagtagtgttatcgccatcaatggaaggtgcgttataacgtgtcgttgtatatatgtcatatgtacctccatcactctttacggtacctttatacgttccggtaggtctgtaagtaccccatgaatccaccacataatattcgatgaggggcgatctcgtccagccatataaagtcaaatatccattgccgttcggcgcccaaacaccggcattatagtttattgttctaaatggcgagcctgtagtccagcctttaccaacaacgaaattcccggtattagaccaattaacactgtaatttccgccagagccattgactgcgtttactgttccgcccccgtcagtccaattttgccagtaatctgtgccagctgcagaggcggttgccgaaaacatgctgatactcatgaaagctgccgttaatcccactaagaatttctttttaaacttaaacatatgttacctcctatactattttttctgactttgacatgaggcagcactcgtaaatatttaacgaacgccaacgcttttgatcgttcctttcaatataatagcatgaatacatgggtgaatattaagaacaattgtaatttaattacaaagacccaaaaaattgtatgatgagtggtcttgtaccgccatagccttatttcgcagaactcagtgatttcagttaaaactctgaggaaacgttttatttgaaaaaacttttttgccgaaagaatatctgcatacagcgtcaatgctgttcgccgtattggcaaatccgaagcagaaaaactttaccgttgtcggagaagcggaataagaaaaaatcccgggcggatgcgccgggattttcctttttaatatgtattggcatcaatattattaaacgcgtcgtccacgatgccgagcgtcatgaggacaatgaaaagaacgataccgagaacggacaagccgaccgtcacgatcagatagatcccctgcattttcacgaactttgcataattctccagcatatgttcctctgtcagttcattgaactgcgccgccatctgtcccgcttcatttgccgagcgcatcagaaaaatgccggcaatgatctgcagaacgccgggaatggctccgattaaaaagaaaaacgcgcccgaaagcgccgcaaacgcgcctataataataaacaaaatacctgtcgcttttccccatttcgaaatagaaataagcgaacgattcactgattcaggtttcaaaccatggcactcctttacaaaaaaatactcacttttcatttatacactattcggtcattcttttgaatataaaatgtgttttttcaagctgtgtccgtttttatatcagaaaattcccgagaaacatcccgggaattacaaaatcggcgacagaagccttgaaatcgattctttaatgcggatccgcagcgaacgctcctgatattcttcatacgtatattttctggagacgagcagatcttctttaaatgaggaaatgagttttttcgcgatggtgacgtcataaataaaggcgttgacttcaaaattaagtctgaagcttctgacgtcgatattcgccgtaccgactgaagccgtctcatcatcgacgacaatcgtttttgcatgaataaagccgttatcgtaaatgtagactgaggctccggctttcaaaagatcgccgatgtaagataaagtcgcccagtaaacgaaagcgtgatccggcttgttcggaatcatgattttgacgtcaatgcctgacagacaggcgatcctgagggcatccaaaagacttgagtcaggaataaagtaaggcgtctgaatcaggatcgaccgtttggccgttgagatcatcttgatatagccgtttttaatttgttcccattctgaatccggtccgctcgtgacaatctgcatcccgacattgcccttcggctcgcattccggaaaatgattcggaacgtaagtgagcgtatggtgatgggaagcttggttccaatcgagaataaaccgtgtctgaatggcgtgtaccgccgtgccttgaagtctgaggtgcgtatcgcgccagtagccgaatttcggattcaggccgagatattcatctccgacgttaaagccgccgacatagccggtttcgccgtcaatgatgacgagcttgcggtgattccgataattgagccgcaaattaatcggacgaagcctggaaggaaaaaagacttccacatggccgccggcgtcccgcagcggtttgaagaatttttttctgagtgatcttgaaccgagttcatcatataacactctgacctttacgccttcccgtgcttttttcactaaggcatcgcgcaatttttttcccagttcatcacctttataaatatagtattgaaggtgaatgtgatcttttgcgttggaaatgtccttcattaagcgtttgaacttatcgcgcccgtccgttaaaatctccaccgaattatcctctgtaaagactgcgtggttgttcatgacaagcatatagatgaggtctttattatccacagtcgccctgttgttaaattggaattgcctcgacttcagatctttcagctgaaacttcagcagcttttctattccgatttttttacggtcttcccattgaaacaggtgcttgcgtctcaggttatggccgaataacaggtataaaataaaccctaaaatgggaataaaaaaaagaaccaagagccaagcccatgaagcgctggcatcgcgtctttctttgaaaatcatgatgacggccaaaagtatatttaaaacgaaaaaaaatccgaataaaataaatgaaatgctcactttgcaaccccgctatatcatatttatcaagactgtgcccattagtattccgacaagtgcagcaatctgattcccatttcaaattataacattgacattttgaaagaataaagagccggaatcaaagatgaatgcagttttctttcaaagaaagttccgggtgcggtaaaatatgcatatatgaaaaagaagacaaaaatgacagcaaaggggagagggcatgaagctggagcatgcggaacaattgccgggattcataaaaaaagaaattcagaaaatacaaatcgccatcgcgccgctgatgaaaaaaagcatcatttaccgttttcttgctttcccgctcgccgcttttagtctgtttcatctggcatcgcttttgattcaggccccttccgggagaggagctctcgtatcggccggcatttttgccctccttgcggctctgggtcttgcgttttttaaggaagccggctatcagcggaaacaggtgcaaaaaacgatccggctttatatgctgaacagaatcagaaaaagcgatattctgtccgaggaacggaaaagcgcctacacccggctgattgccgaggagccgtctgcgatgaagagctttattgaatttttaacggaagaagaccggaaaaaagaaatgctgtattaaaaaagagctgacgcgcgatcagctctttttgtcattcaaacacaggatcgttctcatagtaatatgaatcaggcgtgtcatacgtatcagtgctgtaataagccataattccgatgacagcgaagatgacgactaaaataaaagcgagaatgcccagtaccacactggatgccgcgtaaaaaaactgcattttgataaatgacgcataatgtgcaagcatattttcttccgcgttttcttctagcccttcctgaagggcggcagccgcttttgccgagcgcatcagcatgacgccggaaatgatgagcagaacacccggaatggctccgagcagcgtcacaatggctgacagagcggaaagagaacctgtgatgatcagaaacacggcggtgatctttccccatttggcgatgtcggcaagggaacgggcttttttattgagcggctggttttcgtctttgtctttatcgatggtgatcatgacagttctctccctaaaatgttcaagtcatatcgttttccgtccatttcggcgatacccgggaatacgccccattcggtaaaaccgaatttttcaaacagcttaatgctcggcacattatgtccgaagataaaagccatcaggctgcggatgccgattgccggagcgagtgccagggcttctttcagcagaaagcttcctgctcctttgccgcggcaatcctgatgcagatagatgctgatctccgccgttttgtcataggccggacggccgtaaaacgtttcaaagctgatccaggccgccactttgccggtttcatcttccgcgaccatcagcgggcgccggtccgtgtgccgcaaaaaccaatccatctggtctgcgggcgtcacttcttccgtatcagccgttaccattcgtgaggcaatcgtcgagttgtatatggccaccaccgcatctaaatcctccaatacggctttgcgcagggttaaattcatattccgggatctcccttcacatttcattacataattaagtgcaatctgcacatactacttctaaaaaagttttttatggatgtgtatatattttcagaaaagtgttcagaatgttgctgaggtgatgaacaaatgagagaggaagaaaagaaaacttctcaagtcaaaaaacttcagcggttttttcgcaaacgctggatattccctgcaatctacttagtcagtgcggccgtcattttaacagctgtcctttggtatcaatccgtttcgaatgatgtgaaggacaatctgacgaacaacggcggaaactccgcgtatgacagcggcaaagacgatgccgtcgaagtaggcaagtcaatggaaaacgtcgcaatgccggctgctcattctgaaaatgtttctgttgtgaaaaagttttacgaatctgatgccgcaaaaaaagagaaagaagcagcacttgttaactataataacacgtacagcctcagtaaaggaattgacttagctgagaaagacggaaaatcatttgatgtttctgcttctctgagcggtacggttgttaaagctgctaaagacccggtactggggtatgtggttgaaattgaacactcagacggcctgtctactgtctatcagtctttatctgaagtcagcgtggaccagggcgacaaagtaaagcagaaccaggtcatcggtaaatccggaaaaaatctttacagtgaagaaagcggaaatcacgtgcactttgaaatccgcaaggacggcgtagcgatgaacccgctcaattttatggacaagccggtaacatctattgaaaaagcggcggctgaagagaaaaacgctgtgacagaagaaacggaagggtcaattcagcagtcttccgagaaaaaagatgtgacgcctaaaaaagaaaccgaagaaaaaccaggtgacaaagaagacggcacaaaagacaagacagatggtaaagatgacggctcaatgaaagattcgggcaagtaatcttgatcccaaagcgtctatcagctctgataggcgcttttcatattgctgcatgtgcctttatactaatagaaaacgaaggagatgctgaatgaataaatgtctggcggccgggtggctcgtctttgttttcgtttctgctttgactgaaagctttcacgatatgattgtgtcgcagacggtgtccttccgtttcacgtcccatccggatgtgtccggtttctttgtgttcgatatggcggagctcgccataccggaagcggcgattcaaaagctcgggcacgcgttttcattttttgtgctcgcctatttgtttttcagggagcgcaggcgcatgaagagggcggtgctgtatgcattggccgccgctttcctgacagaaatcgtccagctctttttcggcagaaacggatgcctccgcgatgtgctgattgacagtctcggcattgccgcattctgggctttacaaaggaaaaagcatacagccaaacatacaaaaaccggcagtctgtgacagacgccggctttttttatatattatggtttgtcgatttgcttttatgaacgatactttcatagattcgcacgatcagatcgacaatcggacgaagcacatttgaaaatctgaacagcaggaatccgacaatgagggaaacgataatgcttccgagcacatcgatcggataatgatggccgacccaaattcttgagaagccggtcaaaaggccgaaaatcacaagcggccagccgagttttttgttgcggaacagaatcgcaattgaaatcgccaaagcgcctgtcgtatggtcactcgggaatgaagcatccgcggcatgagggatcagcgtatgaaccgtatgctcgacaaaggggcgcggctcgacatagactttcgtgatgaggtagttgatgataagcgccgcaacacccgtgaagcccgcgtacagggcgttttgtctgccttttgtgcttccgaacagccacatggcaagcaggaaaagggcgtaggcgtaaatggcgtattccgttataaaaaccatgatagagtcgagaatggcactatggtgcgacaaaccattgatcgctttaaatagttcgtaattcacaaatatcaccttttatctttattttatatgaacagtgtaatgcttttttctatgagacacaattggtattaaaaataatcataaaaaagtaaacagaatgaaacgtgactgtattactgtgcgtcaagtatgcgggaaaagaatagccgaaggagttttgtccgttgctgaaacgtttgaaaaacgccgatctgccgcttgtgtttgtcattatgctgctttgcggattcggcttgttaatggtgtacagcgccagtgatgtgatggggtctcagcggtacggagatccatcctatttcttccataaacaaagtgcctctttactgatcggattatgcttatttctatttgccgcctgtctgccgtataagcggtatgcgcggcttgtaccgctgtttgtggtcggttcgctggtattgctgctgctcgtattgataccgggaatcgggctggagcggaatttttcccgcaggtggctgggagcgggcccgcttgtcgtacagccgtctgaattggcgaagatcgccatgattttgtatttcgcttcggtttatacgaaaaagcagccgtacattcatcaatttgtgaaaggggttctgccgcctttagtaattttggggaccgcttttctgctcactttggcggagcctgatttagggacggcttccttaatcctggcggcgtgcgggtcgattttattatgtgccggcttgaaaaagcgccatcttttcgtgctcggcgcgacggcggtgtcgggggttgtttatctcgcattttctgcatcctatcgtgtgaagcgcctcgtttcctttaccaatccgtttggtgacgcgaacggggacggctatcagctgattcaatcctattttgctatttccggaggcgggtttttcggaagagggcttggaaacagtgttgaaaaaatgaactatctgcctgaggcgcataccgatttcattatggccgtgatcagtgaagagctggggatattcggtgttctgatcgttttgggattatattttgcgttaatgcttctcggcgtaaaaacggccgtgcgggctgatgacccgttcgggaagcttcttgccatcggaattacgtttcaattaatgtttcaggttgtcttgaatttgggagcgatgagcggactcctcccggttacgggtgtgccgcttccgtttatcagctatggcggttcttcattgattatgacgctgtttttgtgcggcatactggtcaatatcagtacatatgcgaaaaaacaaaccgtacggcataagcgtcctgccccgcatgaaaaaaaggcttcttctttttaatgaagcccgaaaaaaacgcccgggacatgctgtctccgggcgttctgtctgtttataaagctcctggtccttcttctccggtgcggatattaatcgtgtttccgatttcatagacgaatattttgccgtcgccgggctctcccgttttcagcacttttttcgccgtttccaccacttgatcaacggggaccttgctgacaacgatttccactttcagccgttcatatacattgctttcaattttgactccgcggtacagttcggtgtgagctttttgaaggccgcagccgtgtacgttggagaaggtcagcgatgtgactccgattttaccgagttcctgtttcaatgtttcaaacttagccggacgcgtaacgatttctaccttgaacatttgaccgctcatctaagccactcctcactttataagtcctgatatgctttttccccgtgcatcgttaaatcaagcccaagtgactcttcttcttcgctggcgcggaggggaatgaacagacctacaattttaatgataacgaaagtgacaataaatacaaatacataggttgccgcaatggccgcaatctgcttccagagcagtcccggatcgccgtaaaacagtccgtttgccccgccgtcattgacggaagtggtggcgaataaaccggtcgcgatgccgccccatgtcccgccgattccatgcaggccgaaagcgtcaagcgcatcatcgtatccgaaagtctttttgagccaatacacgccccagaagcagacaagcccgccgatgaaaccgattacgatggaagagaacggcgtaacgaacccggcagccggcgtaatggcgacaagcccggcaatagcgcctgatacagcacccagcatggtcggttttttgttcagcatccattcgattaaaatccagccgataattccggccgcagccgcggtgtttgtgttaatgagggcaaacatcgcgatactgtcaagcgtgagggcgctgccgacattgaagccgaaccatccgaaccaaatgagcgccccgcccaagaacgtgtaaattaagttgtgaggcgaagccgccgtgccgtccttgcgtttcccgagcacaatcgccagcacgagcccggcgaccccggaagaaatgtggacgacgtttccgcctgcgaagtcaagagcgcccatttggccgatccagccgccgccccatacccagtgcgcaacgggcgtatatacgagggaagcccacaaaaaggaaaatacaagaaaagcactgaatctcatgcgttcagcaaatgctccggaaataatggccgtcgtcagtacggcaaacgtcatttggaacatcatgaataatgaatgcgggatcgtatcactataacttccgggttcaaagccgacccccttcagtccggcccattcaatcccgccaagccatgtattcccgggggcaaaagcaagtgaatatccgtacaaaacccaaacgacggatacgatggcgagggaagaaaaactgtgcatcgccgtgctgagcacgtttttgctttttaccattccgccgtaaaacaaagccagcccgggggtcatcagccacacgagtaaagcgcaaaagaacataaatactgtatcgcccatctgcatgttgtattcctccgtctcattcaaaatgtaatcgtgattaattcattattatagagaaaaaagaacgataaaacattttcgtgtaaggttatctgacatgtttttttgcgttcataatgtcgctttttcaaaggggtgtcatgcgactttatatccataaaaagagcgctggagcatggcggaagaaatcctgtccgggaaagagtaaaataaacggggtgagaaacactaactgcatcaggaggaattattatgacaacatcattgaatctgcaatttgaaaaaacggctttggtccttattgatttacaaaaaggcattgtgccgatggataaaagcggtaccgttgtgccgaacgcgaaaaaattaattgatgtgttccgggaaaaaggcggatttatcagctttgtgaacgtagattttcatgacggagcggatgcgctgaagccgctgacggatgaagaggcggcgggccattcggctccgccggcggattgggctgaatttgtgcctgaaatcggagtgaaagaaaacgattatacggtaacaaaacggcagtggggcgcgtttttcggcacggacctggaccttcagctcagaagacggggaatcgacacgattgtgttatgcgggattgcgacaaacatcggtgtggaaagcacggcgcgggaagcttttcagctcgggtatcagcaagttttcgtaactgacgcgatggcgacattcagcgatgaacagcacgaagcgacactcaaatttatcttcccgaaaatcggcagaagccggacgacggaagaatttatcgcacagacaaaatgacaatctccaaaaaaagccgcgtcctgttcttgacggccgtggcttcggggacgatgctgaacccattgaactcgtcgatgatttctcttgcgcttcacagtattcagcatgaatttcacctgtcgtttacaacggtgtcctggctgatatcgtccttttatcttgccagcgcggtggcgcagcctgttaccgggaagctcggtgatatgctcggcaggaagaagctgtttttgatcgggcttctgcttgttgccgtctcggcggtcggcgcgccgtttgcgccgacttttatgacattgctgatcatgcggctttttcaatcgatcggaagcagcgcgatatatccgtccggcgtcggattgatccgttcaaatatacaggagaagcaggcttcggcgctggccgtcctgtcaatctttgcatcagccatgacggcgctcggtccgactctcggcggttttctgatcgtttggggagggtggccggcgatctttttcgtcaatctgccgtttatcatcctcagtttttttctcggaatgtatatgtttccgaaagatgaaaaacgcgagatcggcggcttgaaaggcgtgctccgccagcttgatacaatcgggatactcctgtttgccggagcgattatccttctcctgtcgtttttattgtccttcagtacgaagcctcactatacagaaggcgtattcgggcttttatttgtcgggctgtttatctggcgtgagctgaaaacagagaagccgtttattgatgtcaggctgtttaaaacgcatcggaaactatcgtcggtgtatattcaatttattttgctgaatatattcttttactgcatctttttcgggcttccgagctattttcaggatgaaatgcatttgtccgttcagacaagcggattgattatgctgtttatgtcgggcatgagtattctggtgtcgcctttgaccggaaaatggatagataagaaagggcttcttcagccgattgttgccggaacctgcctgaccgcgatcggagcggtgctgttaacgtttttcttccttcaggcgcccatgataggaaaagggctgatcctgtccgtgctgggtgtcggctacggtttcggaaatgtcacgtttcaggcggccatgctgaaaacgagccccgccgacatggtcggaacaacgtccggcctgtttcagacctgcaggtatctcggttcgattttgtcttctgtcattttgggcattcttttcggaaaagaaattaccgccggccattttcatatgctcggcacgattcttatcgttgtcggcgccgtaagccttttgatggcgttccggttttcggttctcctcaaaaaagcctcttaacaggcgcaaaaaaaagagacgggctctccccgtctctttttttgtgtaatgtgctcaaaaatcaaaacgattattgtcgacagcgaccaatgttatttgcggaattttcagttatattttttcacatgtgatgtaaggaaaacgtacatgcaggagggagaaaatgacaaaaataacgagtgatcggctaagcaacaaagatttactgcctttagaagacggcgaacggacatggaaggcggtgaattttgcatccatctggatgggttgtattcataatatcccgacctacgcgactgtgggcgggctcattgcgatcggcctttctccgtggcaggtgctcgccattatcgtgacggcgtcactgattttgttcgccgctttggccttgaacggccatgccggaacgaaatacggcctgccttttccggtcattatcagggcttcttacggaatatacggagctaacattccggcgcttctcagggcatttacagccatcatgtggctcggaattcaaacatttgccgggagcactgccttacacattctgcttttgaacatatggccgggctgggggagtctcggcggagattggaatatattcgggcttcatctgccgggctttctgtcgttcattttcttttggggcattcatctgcttgtgctgcggcacggcatggaatcgatcaaaaaatttgaagtgtgggcgggcccgcttgtttatctcgtcttcggcggcatggtctggtgggcgatagatattgccggcgggctcggtccgatttactcacagccgggaaagttccatacattttctgaaacgttttggccgtttgccgccggagtgacgggcattatcggaatatgggcgacgctgattctgaatatccctgacttcacccggttcgccgcgtcgcaaaaagaacagattcgcggccagttttacgggctgccgggaacgtttgcgctgtttgcgtttgcaagcatcacggtgacatccggatcacaggtagcattcggagaaccgatctgggatgtggtggagattttggcccggtttgataatcctttcgttatcgctctttcggtcatcacactttgcatcgccgccgtctcggttaacgtggcggcaaacatcgtgtcaccggcctatgacttggcgaatgtcctgccgaagtatattacattcagaaggggagggtatttgaccgccgttttggctctgttcacaataccgtggaagctgatggagagcgccacgaatgtatatgcgtttctcggactcatcggcgggatgctcggaccggtggccggggtgatgatggctgattattttatcatcagaaaaaggcagctctcagttgaagacctttattcagaaaccggacagtacacttattacaaaggctataattaccgggcctttgccgcgacgtttctcggcgcgtttatttctttaatcgggatgtacgtcccggcgttcgccggcatctatgatatctcctggtttgcgggtgtcattttgtcatgtctcggttatacggcgcttatgtacattcatcctccttatgcaaaagcggagggacgaatcgtgcgggaaagagcggccgaataaaaaaagccgggggctgcccccggctttttgtcatatcagtctgcgattgaaacgtttccgtccgcttcaagcggcgttctttttttctggctccagccatacaggagcaaagcaatcaggacgaacagccccgctgccagataaatcgaatggaatccggccgaagcgacgaagaggccgaatacatatgacccgccggcaatcccgctgtcaaagaaagtgaagaaggtcgccgtcgcaaagcctgaacggtgtccgggcgaattctgaatcgccagcgtctgcatacacggtacgatagagccgtatccgagaccgattacggcaccggacaagagaagcatgagggcgctgtttgtcatcgccagcatgcaaagccccgcggagaacacgataatcgacggatagatgacgattcccggccccactctgtcaaacagctttcctgtgaaaggacgggcggccatcatcgtcacggcgaaacagacgaagaaatagccgctgacatccaacaggtggatcgtctttgcataaacggataaatatgaagtcacacttgaataacagaaagaaatggacaacccgacaatcgcgattttaagcgcgcctttttcaaacatgtcggagaaagaaaaacggaacacagtcgttccgctgttgttttgatccggcacacgaatcataaaagcaatcagcaagcctaaagaaacaaatacagcaaaaagcgtaaagaacaccgggaacgatatgactttcacaaggctcagtccgagaaacggaccgatcgccatggcaaggttcatagacatcgcaaaataaccgagcccctcgccgcgccgcttggcgggaataaggtcagcggcaattgcgcctgtgaccgtcgttaaaatgctgaaccagatgccttggaaaaaacgcagtccgagcagcagatagaaattgtgtatcggcaaatacagataagaagacagggcgaacagcgccagagatacaatcgtcattcttttcttaccgaaccgttcaataatcgcccctgaaaaaggacgggtgataatagcagataacaggaacaggctgatcaaaagccctccttgcgattcactgccgccaagctcctgaatcatatagataggcagcacggccaaaaatgtataaaagaacacaaagacaaataaatttacgagtacgaccataataaaatctttggtccagatcgagtcagatttactcaaaagtacagcacttccctttctttattatttcgttaaaaacacattcagaaactcagaaaaagcttccttatctccatcttggaaatccgcaagcatgtcttcctcgaacttcagcatctcttgattgatgctgttgtatttcaattcagcttccttcgtcaggacgacgagcttttcccgcttgtcttctccctgttcccgctgaatccagccgttttcttcaaggcgtttgatcgttctggtaacggtcggcgcctctacgttcagataagaccagatttctttttgggtcatcggtccgatcgtttttaagcaatataggattgaccattgagaggagtacaggccgaatggttccagccgttcattggctttcttcgtaatcaggcgggcgcattgattgatttgatgaatgaggcgtctgttgacgtggatcatttccgttctccttttcaaaaaacttacctaagtaactaattgtgctgtttcattctacagcaggatcgcgcggatgtaaaccccccgttcaaaaagcagaaaattatgacccgccccttgtccttattgagtttttagcatattcccaattcattgctaatacactgttacaaacctatcaaagagagtgtttgaggtgagggatcgtgggcatatttctaaaaccttcttatataatcggacaacgaagaagctgcatcatcagtgaatctgttacagaatacggatctcatttcacacttctcacatccaactggggaggtcgagtggtgtgcacgattacatcaaagagcgaacaatcaagattggtaagtatatcgtggagacgaaaaaaaccgttcgtgtcattgcgaaagagtttggtgtttccaaaagtaccgtacacaaagatctgacagaacgcctgcctgaaatcaatcctgacttggcgaatgaagtaaaagaaatactcgattatcataaatccatcagacatttaagggggggcgaggcgacgaaattaaagtacaagaaggatgaaattcttgaaggggagcccgttcagcagccgtagcgcctgacgtctgccgggcccttttttctcctccgggcggtttcgcgaatatccgcaaaattttgtcaagaacttatatcgatcagcagcttttttttgataaattatgataatatatataattagggcacaatgtggatattttactgtgaaacagatatcaaggaggatataaatagatgtttgcaagggatattggaattgacctcggtactgcaaatgtactgatccatgtaaaaggaaaaggaattgttctgaatgagccttccgttgtggcacttgataaaaacagcggcaaagtgctggctgtcggtgaagaagccagacgaatggttggacgtacacctgggaatattgttgcgatccgtccgctgaaagacggcgtaatcgcagacttcgaagtaactgaagctatgctgaaacatttcattaataagctgaatgtaaaaggacttttctcaaaaccgcgtatgctgatctgctgcccgacgaatattacatccgttgagcagaaagcgattaaagaagcagctgaaaaaagcggcggaaagcatgtgtaccttgaagaagaaccgaaagttgccgctatcggcgcgggtatggaaatcttccagccgagcggtaacatggttgttgacatcggaggcggtacgacagatatcgcagttatttctatgggcgatattgtcacctcctcttctattaagatggctggggacaagtttgacatggaaatcttaaattatatcaaacgcgagtataagctgctgatcggtgaacgtaccgctgaagatattaaggtgaaggtcgcaacggttttcccagacgcacgtcatgaagaaatcaccatccgcggccgtgacatggtttccggcctgccgagaacgattacagtaaacagcaaagaagtggaagaagcccttcgtgaatcagttgccgtcattgtgcaggccgccaagcaggttcttgaaagaacaccgcctgaattgtccgctgacatcatcgaccgcggcgttatcattaccggcgggggagcgctgttaaacgggcttgaccagcttcttgccgaagagctgagggtgcctgttcttgtcgctgagaacccgatggattgtgttgcggtcggaaccggcgtcatgctggataacatggacaagcttccgaaacgcaaactgagctgatgataaaacctcattctgaaaaagaatggggtttttttctgtcaaacccttcacgaacgggaatgtaaatccgataataagaaaaaatgctgattttcattatagaacaaatgttccggtgaggcaactggaaataatgctatttcagaggtggaagacttgttaaaaggattatataccgcaacgtccgcaatgattacacagcagagaagaacggaaatgctgtcaaataacatcgcaaacgcgaatacgtcaggatacaaagaggatcaaggttcaatccgcgcctttcccgagatgcttctgagccgaatagaaggcgataaaaaaacgaaaatcggttccgtcaacacaggcgtatacatgcaggagctgaaaccgttgtttacgcagggaagcctgaaaacgaccgatcagccgacggatatcgcgcttatggagaatcaggttcccaagaatgccgaaacgaatgaaaacgccgagctgttttatcccgtgcagactgcgggcggcgtccgctattcaaaaagcagcactttctcattaaatgaaaacaatcagcttaccataaacggaaaccttgttttatcaacaaacggacagccgattacagtcgacaatgaaaaattcaccgtatcagaaaacggaacggtcacgacaaacggccggccggcggggcagattgacatcaggatggaagaagacgtgcgcaatctgaaacgggacggcaatgacctatacagcacggccgacggcactgaactgccgagcgcggcggcgaatccccaggtctcgtattcattaaagcaaggcgtctcggagctttcgaatgtggacgtgacgagcacgtatacagaaatgacggaagcatacagatcatttgaagccaatcagaaagtcattcaggcttacgataaaagcatggataaagccgcaaatgaaatcggcaaagtgtaacaaaatgggggacgttcaattatgatgctcagatcaatgctgacggcttcaacagccttaaatcagcttcagcagcagatggatacagtcagcagcaacctttcaaacagtgatacgacaggctataaagcgagggactcccgcttttccgagctgatcagacagcagtatgaccatatagatgacaaaaaggaaaattcgccgaacatgcggaaaacgccgcccggcctgcgtctcggcgccggaacggtcatgactccgcagctggactcagggcagggaggcatcaaaaaaaccgaccgtgaccttgatatcgcgttcacctcaccttatcaatatcttcaggcagaagcggacggacggcgggtgtatacaagggacggctcactttccctcaagccggccggcggaaatgaccgggtgcttcagctgttgacagcgggaggcaatcccattctcgatgagaacggccagcccatacaaattgacagttcgctgaatcagctgaaaatcagcaaaaccggaacgctgactgcttcagacccggcaggaacccgttcgcagacgtttaatctcggcatcgtcaatgtcaataatcctcaggcccttcatgcggaaggggataatctgttttccgtaaacggagcgggggcatcagcgattgaagagcttaccggcgcaaaccggcaggcaatcggcatggagcagggcgcgcttgaaagttcaaatgtcgatatgtcaaaagaaatgaccgacctaatcgtgtctcagcgttcctatcagctgaacagccgcacgattacattgggagaccaaatgctgggcttaatcaactcagtcagataaaagaaggggcgttttgatcagccgcgcatgataaaaaatgcggctttctcaaaatcgcccttttttttgtagtaatcagtaatatcctgaagcagcacttccaaatccacccacgcttcaattttctgcagctccagcacgagtttctgcaatcggtcgtacgggtcctcctgagcggtgtacagtatgttgagcgcggtcagcttcaatttcattatcttgttctgcactttttcagatatgtataaacctttctgcagcacggtttgtccttcggcggcatatccggttttaaaaagtgctctgaccgcttcgtatacacaatgcaggtaggaaacgggagactctttctcgaaacgctgattgcccaatacctttttgtaaaaagggagggcctctttatcttttttctgggcggtctttaaaaaaccaaaattataataggcgtggcacagcaggttattgtcattgatccggtccgttatctttatggattcattaaagagctgttctgcgtcttcatagcgtgcctcgtctatgtaattcacggcgagaagcagacggcagctgagcgtttttttgatgtaaccgaattcaccttgatagatttccagcgctttattgacatattgaatggagagcgcaggcgacttcatcatgtaatatgcacccgctgttttataataaaattcagcggcttcgaaacggtcctgaatggccggcaggtactgttcagcttctttaaagcggcagacagcacggttcggagcgccattcaccatatggaataaccctttgaaaaaatagaaataataagttaattcatggtccatctcatctttgcgccgcttcagctcgcagaacaatttagtcagaccgtcttttttctcaaacagcagctgaaaccgtgcgaaaaacagctgatatctgagtttgagctttgcattcttttgtaatttggggagatgctgattgatttgttcgtgaagggaacgggctagatcgaattggcgttttcccatggcgtcataccactcattcagcatcaccagcgtacgtttttcagtaaacttagcaatcatcttccaacctctttgcatagggtaaaaatctttatttatcataacacattaatggacgaggctcattgccagctggttacagtttacagcgcggttgaaaaagaaattgattcataatatacttccaaatgtacagattggttagcgcatataccttctatacatactattgtcgatgaaggagatgtcaagaaaatgcttgatactcagcaaattaaagaaattattccccatcgctatccgtttcttctggtagacagaattacggaagtcgaagaaggaaaacgggcggcgggatataaaaatgtgacggcgaatgaagattttttcaacggccattttcctgaataccctgttatgccgggcgtcttaatcgtagaggctttggcgcaggtcggagcggttgcgatgctgattaaagaagaaaaccggggcagactcgcattttttgcggggattgataactgccgtttcaaaaagcaggtaaaaccgggtgacaagctggagcttgaggttgatattacccgcgcgcgcggtacgatcggacgcggcaaaggcgttgccaaagttgacggcgagctcgtgtgtgaagctgaattaacatttgcgctcggagaataaaaacaaacgaatgggcttataaaaaagcccattttgtatagaaaggggtgaatgtaatgtggtcagaatttaaaagctttgcgatgcggggcaatatcatggatctggcaatcggtgtcgtcatcggcggcgctttcggcaaaattgtgacgtcgctcgttgaagacatcatcatgccgcttgtcggcctgcttcttggcggtcttgacttttcagggctggccgtgacattcggcgatgctcatatcaagtacggaagcttcattcaaacgattgtgaacttcttcattatttcattttctatctttatcgtgatccgtacaataggcaagctgagacgtaaaaaagaagcagaagaagaggctgaagaagcagaagaaacagatcagcagacagaactgctgactgaaatcagagatctgctgaaacagcgggctcctcacaatgactaaggcacaaaaaaaggctggatgattaacgtccggccttttttatgattataatttttgtttaaacgcttcaatcagccggctgcccgagtagccttctttcacgagcgactccagaatgctttctgatccggggtggtttcttgacaccatttgaccgtaaattaaaacttgtatactcttttccagctccacaatatttttgatgcttcccgtcagctgggcggggcggttgctttttttcgtaatcgttacaaacaccttcgcttctttctggcttttcatcagcatgtcaaaaaaagaaaagtgttcggccgggaccagtgcttcaattaaccagtggttttctccgtcctctttgttgataatcaatccgtctaaaaggggaaactgttcaatcggctgatcgtctttatctaaacgttccacattcagatcaaccagtttaaaggttttcatctcttattttcacccctgttgtccatgtttttcgttcatttattataacacatatcatttttcccgggaaaatgctgtaagacatgcttcatcatttttgtaggcggtcaacatttaatcatttctattttttcattataatgtaaaagaatatggtcatggagagatgcttatgaatcaattgcgcctgaaggaaatctatatagaagacggttcaaggcgaaaagacgatcattcctacttggtatgcaaaaaggaagattgtgaggtgcatcttaacagaaggggaaatgtcgtctttttatatgaaacaaaagaccgcatggaacagtataaaattcagctttcattgactgataaaaagctgagtttttactggttcgcatgggacggcggaaagtttgtccgcatgtttgagaaagactggctcaaaacgaaacttttctcgcggctgctcaaaaatacatattacataagcggtcaaaaacaaaagttttttttatcagaaagaaaaacaaaaacataaaagcagcccaaacggataaaggctttttccgctttttgctttcataagcctttatactacaatgaagccagcctcgaaaaagagaggaggagacggcttgtttaaccacgttatgcttgtcggccggctgacgaaagacccggagctccgttttacatcagcgggcattcccgtcgctcatattacgttggcggtaaaccgcaattttaaaagcgcgtcgggtgaaaccggaaccgactttgtcaactgcaccatctggaggaaaaacgctgaaaacacggcattgtactgccaaaaagggtcaatggtcggtgtaagcggcagaatccagacgagaagctatgaaaagacagacggcgtaaaagtttatgtgaccgaggtcatggctgataccgttcggtttatggatcaaaaacggaaagagccgctggctgaatagcatgcttttttcctcgatttcccgcctttcagcgggccccgcaatacctccttcccattcgccagtcgaaagactggtttttttgtgcgggagctgaaaaatggttaaaaagaagtgatttcgcttataaatacttaaaaacattgaatatattgggataaaaacttataattacttacagataagtgacgaaaaaaagggaatgaggacgtgtatcaagaagaaagactgattgcgataatggaatatttgaaacagcaccggcggatcaccgctgaacagatatgttcgctgcttcatatttcaagagataccgcaagaagggaccttgtaaagctgaaagagcgaggggccattatcagaacacggggcggcgcgattctgccgtcagtgaatcaggaagttccgggctattcgggccggctgaaaaccgtttctgaagagaaaaacaaaatcggcaagctggccgcatccctgattcataaaggagaccggatcatcctggacacatcgacaaccgttcaggcctgcgcggagcatttaaatgtcaccggctgcactgttattacaaattcgatcaatcaggccgatatcctttccgcaaaagagggaattgatattcacctgctcggcggaaagctccagaaggaacaccggtttttatacggggcttccgttgtagaaaaactgggggattatcacgctgataaggtgctgatcggcgttgtcggcatctcggaaaacggcctgacgattccgcatgaagaagacggcatggtaaagcgtaaaatgatccgtcaggctgaacaggtgattgcgctgagcgatcactcgaagcttggccgtacgagtttttatcagtatgcagacctgcacgaggttgacctgctgattaccgatcggctgcctgatcaggatttttgcgatctgctcgaccggcacggcgtagaattgcttgtaactgaatctgaagaagaggatgaggacatgtgaaactgattgccatagatctggacggcacactgctgaacagcagtcatcaagtaagtgatgaaaacaagcgggctttaagggaagcccggcaagcgggaattgaaatcgtggtttccactggacgcgcgcattttgatgtgcactccatatttgaaccgctcggcataaaaacatggattatcagcgcaaacggagccgccatccacgctcctgacggcagcctgtaccattgtgaagcgattgaagaaacaagagcccgggggattttgtcatggcttgaagagaatcaatattattatgaggtgtttacaaacaaagccatctatacgcctgaaaccggcaggcagctgctcgatatcgaaatggaccgggtgaaaagcgccaatccggaaaccgatctttccgttttggaacaggcggcttcagtgcaatacagccagtccggctttgcttacattcattcataccgtgagctctttgagaaagaagagcatctggatttttataatattctcggattttcgtttgatgagcggaagctgaaagcgggctgggaccgattcagcggtcagaaagatctcacccttgtcagctctgccgatcacaactttgaagtggcgtctcgaaacgcctcaaaagggcaggcgctcaaacggctggcgcaaaagctcggcattccgatggctgaaaccgccgcggtcggtgacagcttaaatgactattcaatgcttcaggcggccggaaaaggcatagcgatggggaatgcgagagaagatattaaagagatcgctgatgccgttacattgacaaatgatcaaaacggcgttgcgtatatgatcaggaatttactgtgaaaggtatggcgatactgttcatgactggcgtgacgcattcatggcaaatgcggcgtaacagtaaggacgacataaaagaccggctcttccgagagagccggtctttttgcgtttaatgtgattgcgtcgatgcgctgagggtgaataattcttcaagctcatcggatgacagctcggtaatccaattttcactttggataatctgatcgttcaaagtttgtttcgtttcgagcatggcatcaattttttcttcaatcgttcccgtcgtaatgagtttgtgaacgtggacgaaccgttcctggccgattcggtaggcgcggtcggtcgcctggttttccaccgccggattccaccacctgtcatagtgaatgacatgattggcagccgtcagattcaggccggttccgcccgctttcagtgacaaaatcagcgtcgggtattctttcttctggaaccgttcgacgagggaatcgcgttcctgcttggacaggcttccgtttaaaaactgaaccggttctccgaatgttttttccaggaggcgcttcatcatgttgcccatctgaatgtattgtgtgaaaatgaggcagctttccccttgtccgcggatcgccgccattaagtcaagcagcttttccagtttgacggatctcccgtttaacagctctgtctgttcttccttcaaatagagcgcaggatggtcgcatatttgcttcaagcggccgagcatgctcagaatcagcgctttccgctgcatcccggtcagagaagccatatgttcaaatgtatctttgacaagctgttcataaagggatgcctgttcggctgagagcgggataaactctttttgttccagcttgtcaggaagattaagcgccacttcttcatcccgttttgtccggcgcagtaaaaacggccggattaactgctgaagctggttgattcttttttcgtcacggtctttttcaatcggcagcacatagcgtttatgaaagccggtcagactgccgagatagcctttgttcataaaatcaaagatcgaccaaagctctgtcaggcggttttccatcggtgttccgctcagcgcgatatgatggacgcctttcagctttctgattgcgcgggactgcttcgtatgcgcgtttttaatgttttgcgcttcatcaaggcagacggtgctccatgtcacggaagaaagctcttcctgatcggcgtgcgagaggccgtaagaagtaagaacgacatccgcgtcctgataggccgggacaaatgcttcccccttcggcctgcgggggccgtaatgaagcacggccttcagctgcggcgcgaaggtctggagctcacgctgccagttgccgagcaccgatgtcggcgcaatgattaaggcaggcgctttttgccggccgctttccttcacatggagaaaataagcgatcatctgaatcgtctttccaagtcccatgtcatctgcgagacaggcgccgaagccgttttcccgtaaaaacagaagccagttcatgccgtacatctgataagggcggagctggccctgaaacgcggcgctgacttcatgctccggcagatccccggcatccgtcagtttgcggatcaggcttctgagatgctttgataattcgatcttgatcccggcaaatgccgatgagtcaatgatgtccgtgtcctcggctccgttttccccgtgatccatcagttcgcgcgccagcacgtcggacatgtggaggccctcagattccgctttttccatcagtattttcatctgtttaataaattgcggatcaattttcacccattggccgcggatgttgacgagacgtctgttgtttgcgacaagctcattgaattcatcctctgtcagctcaatcccgttcgtggcgaatctccagttgaaatcaagcagagcgttcatgccgacgaaggactcgccccgcggggaggatgacactttcgccttaagcatcatattgctgtcccggacaatctgccaccatgatgggagaagaatctccacacccatatcgacaagcgtctcactcgcttccgataagaagatccaagcctcttcttcagatatcagcgtcgttcctgaatcaaacgaaagccagggaaccgttctgcggaagcggtcctgttcacgcgcgatttttccgctgtatgcctgccacgcttttttcagccctttcagtccgtcgaaaaaggtgatggagccggtttttttctcacgtaaaaacatctcgattttccagtcgtcaccgtcgaaatcaggctcgtttaatcggaggccgacggtaaacggcgtcagatcgtcatgccagccgattccctccagaaaatcctcttcatccaaaaaggagcctttaaacgtatgaacggccggcgaacgggtttcgatccgccgccatttttccagcaggtcatcattgtactgaatgtagtcctgtaccgcggctgagaaccagtctgccgtaaagccttccagcaaaagctcgcggtctttgaagcgcaggaggccattttgccatgcgtcataatccggaagaaaatcgccgtcggcaataaattcgtatatcgtcgaagccgcttcgattaacggttccgtttcctttgtcagctgcacggtgctgaatgaattgaacgagttttttccaagcagctcgacggtcatccaagggctgagcagaacggccggagtgccgatgaagctgacgtcttcaagaaacgttccgtaaaaggtggactcatgccattggaacaaatgagtcttcatctgactgagagtaagcggctgctccttctcatcatggcttgacagcgtaaatgtccaatcttccatttgttctacatgaatgaaaatttccttaagactcgccatcaatcaactttcctttctgcaattcttcttgaagggcgcgcagcctcttgtagcttgcgctcagccggctgatataacgctcccatacctgctgtttttttgcctttttataaagcgtccgcagttttttcagatggcgcgcagcctctttataggcgctgcggtttttttggtcgataaaaaaggccgccgcccggtgataggaggggatgagcgcttccggatcactggcggcaatttccttcaggatgtccttttcaatttcccagacggaaaaaccgacgaggctgtgaatctccacccattccgcgtaccgccgtttttcgtacaggtactggctgtattcggtaaaggtatagggaaggcagccggaagcaaaccgttcaaacagctgatcatcccgtgagtgccgcgcataatccgccaacagcgcaaacagctctccgatgatgtcgcgcatttctttaaacggcttatcaagcttcgtatagttcacggcaagcggttcgatccggccataccatgttttcagccgtttccagtcttttttcgcggtgagttcaccgagccattgaaaagtgtacggcagcgcttcaggagggaagcgggacatatcttcaaagaccgcttcatcatctttttgcaaaaaggccagatgaagccgtccgaaccgcacttccggcgaaaaacggcgcccgctttcctgttcgagaatctcttgttcacgcgcgacccatttcggccggttcaaaagcgcgctccacatttcaccgaatacccggaggcgttcgtattgaaaaagctcttctttcacaagcagtctgcggagcaccgggggcgtccggtctaaaaaaggatcgagtgaaaaagacaaggcgtacgttttcagtctgtcaatggaggaataaatcgtatccatcagctgttccacgtatggattaatgctgtaataatctttttcggcatccaatctgcctgactcaatcaaagtgaacatgtgaagccagacggcaagcgccgaatgaatctgatataagcttttaagctcgggttttttcggggcgtgttttttgagcgctgacagatagccgtaataaaggccctgcatcgtctggcttccggccggcgtccgcgcctcccacagcgagaattccgaatcaaaaaaagcgagccagcttgacagcgactcttcattcggcagcactttttcctgaaactgccggcggacaagctccctgctttcctcaagcttttctctttccagccaatgttcggtaaaggtaccgacccgctcgaattgggcatatacgtaaagaaaaacggcgagcacgtggcggcagatcgcctcagacgggcatgcgcagccgcttttcaccatgaaaaataagttcagcgtgacccttacaggcacaacatcctgcacatatgcggaaatctctgtcggggtttgaacctgtatacgatagacggaatcctgccgatataaaatgagtgctttcttcatcagctgaacattgtcttcattgtaaggaagaagttctttaagctgttcagccgctgcgagcacatcttctttagcaatcatatcctgaagcatgattatcgctcctaacgagtcacaaaataaaaagattccaattcctctattatatcgcaacacatggcccggaaaaagtttttcctaaaaaaggacataaaaacccgaatgtgtcgaatgatgtattagagattgcaaaacagcacccgacagcatataataatcttgttttcaatttaatggaagccgaaaggaaacgaatgatgaagaaaacgaagttagatcaagaggagtttctgaagattttaatgcatgcgcacgacatcggtgagcagtcctctgagatgaccacaaaagaaatgcttgagaatttgatttcttatattaaaaatggatatgcaacataaaatcccgcagcctcctggccgcgggattttttaatcttcctgtgacaccagtatttaaagcgcttacaaatataatacagattgaagtgattgtctatttttgtcgaattttgtcatttgaaaaggttagaaatgacagtttaaagctgtataatcgtaattggaaaagatcattggagggaatgggaatacacggaaagtgatatggaggttatatgggagaatctgcaagcataaaggaaatattcgcaatactgagaaagcgtctgctgtttatacttattattaccgcggcggcatcttccgcaggcggtctcatcagtttcttcgctcttacgccggtctatgaaaactcaactcaaattttggtcagccaatccaaaaacaatcaaaaagaagtccaattcaatgacgttcaaaccaacctccaattaatcaacacgtataatgtcatcatcaaaagcccggtcatcctcgatgaggtgattaaacagctgcatctgtccatgacttcgaaagagctggaatcgaaaatcacggtatccagcgagcaggattcacaagtcgtgacgattgccgttcgggatacggatgctaagcgggcggccgttatggcaaatgcggttgcatccgtttttcaggacaagatcaccgccatcatgaacgtggataatgtcagcatcctttcaaaggccgaagtgtcggacagccagtcaccggcagagcctaaccgtaagctgaacatcgcgattgcgtttgccgccggacttttgggcggaatcggtctcgcctttttgctggaacatctggataatacgatcaaatcggaagaacagctggaagcgctgctcggcatcccgatcctgggaacggttacttcaatcagtactaaagacagcgttgccaaaagcttgaggatggcggaaaccaaacaagcgggaggcggacatgttgacgcgtaaaaaagacaaacccggaaaacgaagcgtgattgcgatgtctgagccgaaatccatcaactcagaacaatatcgcacgattcgcacaaacattgaattttcttccgttgatacggaggtgaagtcccttttgatcacatccgccggtccggaagaaggaaaatcgacaaccgcggccaaccttgccgtcgtatttgcacagcaggggaaaaaagtgcttttaattgatgcggatctgcgcaaaccgacggttcatttcaccttcaaattggataacggaaccggattaacgtcgctgctgttaaaacagatgccgtttcagaatgccgtcctgccggctgatgaagcaaacttggatattttaacgagcgggccgagcccgcccaatccggcggagcttttatcgacgggtgcgatgaaagatcttctgtcagaagcagccgcagtttatgataaggtgattttggatacgcctcccgttttggccgtagccgatacgaaaatattaggcagctacactgacggggccattatggtgatctcaagcgggaaaacggacaaagaaaaagcggccaaggcgaaagaagcgctcgattactgcccgtgcaagctccttggggccgttatgaacgggaagaaacaaacgaaacattcggactacgcctattacggacaataatgtcacaatgggcgcggtccattctttttaaggagggattgaaatatgatagatatccattgtcacatccttccttccatagacgacggcgcggcggatgatacagaaagcctgaagatggcgagagaagcggtcagacaggggattgatacgatcatcgcgacgccgcatcatgtgaaataccgctatgacacggatcggcatacggtcaacgaagcggtcagcctgttaaacaaacgtttgaataaggaaggcattccgctgactgttctgccaggccaggagatcagaatagacggagatctgctggcaggtcttcaaagcggctcgcttgccccgctccataatacaaagtatgtgctggcggaatttccggcggatcatgtcccggcctatgctgaaaggctgttttatgaactgcagctgaacggatatgtccccgtcatcgcccatccggagcggaacagggaaattcgcgaaaatccttccgtcctttacagtcttgtgaagaaaggggcggccgcccaagtgacggccggctgcattgccggagcattcgggcggaaagcgaaatccttttcgctgcagctgatggaagcgaatttgatccactttctcgcatctgacgcccataatctcggaccgagaaatttttattatcaggaggcgatcagcgttctgaaaaaagaagcaggggcggagctgatttacatgctcacggaaaatgcggcgcttctcgctgaaaacaaagccgtttataaggaacctccgctgcctgtggcccgccgtaagcgctggggtcttttttaatcgtcgtctccatcccgtttaaatgaagcgtaagcggctgttttgcaagatgattcttttatgcttatgctattatcagcggccggcgccgttttttcctatcatgacctcaggctcccggcattccgccggtgccgggatcatatgataatagcggtaagctgcccagcagcaatttctaaacggttgggggaacacgatgaaaataacagtgatcggaacaggctacgtcggtcttgtgacaggagtgtctctttcagaaatcggccatgacgtaacatgcatagatattgacgaacgtaaggttgagcagatgagaaagggattgtcccctatctttgaaccgggccttgaagatatgatgaaacgaaatatcggccggcatcggctggcatttgaaacgagctacgaaaaagggcttgcggaagcggacgttatttttatagcggtcggaacgccgcaaaaagaagacgggcacgcaaaccttacttatattgaaaatgtcgccgaacagattgccgaacatatttctaaagatgcgatcgtcgtgacaaaaagcacggttcccgtaggaacgaatgacagaatcagcgaagttattcattcacggctgagagcggacgtgaacatttcaatcgcttcgaatccggaatttctccgtgaaggttcggcgattcacgatacctttcacggcgaccgcatcgtgatcggggctgaagaccggcagacgcgggaaacgcttgaccgggttttcgcgccgcttgcgattccggtatatcatacggacatcagaagcgctgagatgatcaaatatgcgtcaaacgcatttttagcggcaaaaatcagttttattaatgaaatttctcatatatgtgaaaaagtcggtgcggatgtggaatcagtcgcacacggaatgggattggataaacggatcggcaatcaattcttaagagccggcatcggttacggcggttcctgttttccgaaggatacaaacgccctcgtgcagatcgcgggacatgtggagcatgattttgaattgctgaagtccgtcattaaagtcaacaataaccagcagtccatgctggttgataaagtgctgaacaggctgggcggtgtgacggggaaaaccatcgcgttattagggctgtcttttaagccgaatacagatgatatgcgggatgccccgtccattgtcattgcggatcgtctggcggctcttgacgcccggatgacagcgtacgatccgatcgcgtcattccgggcttccgggctgcttccgtctgcggtttcctatcgggagtccatagaagaagccgtcaggggagcggatgccgtcctgattctgacagattgggaacaaattaaacacttcccgcttgaagcgtacaaagagctgatggaaaccccggttattttcgacgggagaaactgccactcgcttgaggaagcggaacaggcgggcgtggaatatatctcaatcggaagaagagccgtcgtgcctcagactgattctgtcacttgaaaggccggcggtccgcgccggccttttatcatacaatcattagagacgaaggagatattaatcgtggaaaacacatggaaattgccgaagcaaatggaatcatcccgcggtctgctggaaacgtcagcacggccctttatcaaactgcacgtcaaaaaagctgaaacgggactgtatgacaataaaattgccggagacccctattttccgaaacatgaaccataccctgaagatgaaagcggcaggccgatgaagcttctcgcccaaatcaattttgcggatatgcccggactacctgattttccggacaccggcattcttcagttttacatatcggtcagtgatgacgtatacggtttgaattttgacgacgggtgcgcgcaaacgggtttctgcgtcaaatattttgagcacgtgacagatcgggaagaggagctcatggatgatttttctttcgttcaggttgaagaggagtacgattttccgattcaatccgaagcgctgatcacccctgagctgtctgctgaatgggcgctcccgtctgattttcaattcaggcaatatgccgggatggatgccttcgactatttcgagcagtttgacgatgaggtgtatgacgaatatacggtgaacgcattcggccataaaatcggcggctatgcgtccttcacccaggaagatccgcggtcttattcccatcaaaaccatacgattctgctcttgcaaattgattcagatgatgacattgattcgatgtggggagatgtgggaatcgccaatttctttatcagaccggaagatttgaagaaaaaagatttctcaaacgttttgtacaactgggactgcagttaacgacattattagaatcatgatacaaggcaaaggagacggttattcactgtctcttttttttagggaatttatcatggatacatagaggagatcaatgaatggatatgccgtttgtgtgagtcttttggcgttaatgatgagcatctcggctgctgaaaataagtcatttaacctatttaagctgctttctgtctattttaaaatataatatatggaaatatagtatggaaaagtctgtgctttttgtacgactttttgcgtaagacgaggtgaaaacagatgagccattcaagcacattaagccatattaacagcaccatcagccataaactgggcgagatcgaacaccaaattgataaattaaaagaagcgaaaagagagatagaatctctgcaggaagagggcgtgtctgaaatcagggacatcctcaggccgcacctggatcatcattggaccggcacttttgctgaagaatttgatgaccggcgcgatcaggcccatacagaagcatacagaatcgtcacagacaaatacgacggttatatttacagaatcggcttaaagatgacacagcttgaaattgaaaaaggagggctccttgccgccagaagcatcgcgagagaggcagagcacctgctgacgctgggagaagaagcccttgacacggtcggagaaaaaatacaatcaatcaaaaaaagctggagttggttttaatggcagaaataaaactcaaatacggagccgtcatgaagcagcttgaatccgtcagcagcgctttggaggccgtttctatcgggaacgccggtacaaacggaaaaaacaagctcgactatacctccaaataccaatcccgcgaggcaaagcttgtatcgatgatcagcgaatacaagcaggccgttcataagaacatagcggacgttaaagacaacgtagattctttgaaggaacaggacgaggcgatcgctgtaaaataacgaaagaaaggacttgccgatgagcaaagtgtttgaatcacaatcgttaacggacgaagcagataagagaaagaaacaatacgaagcccttgaagaacagctgcgtgcgctcaaacaagcctttcaaggcgtggccgatctgggtgatgctttgaaagggaaaggcgcagacaatataaaggatttctttcagggacaagcggaaatcgccgacagctggctgacgcttgtctctgctcaaattgcgtttttaaatggcatttcaggtgacattaaagatcaagagctcagtgattcatatgcggagacttcatttttagagcatgagctgcccaatgcggatttgagagcttcagagattgtctccgctcataaagcagaaatcgattcgattttgtctggcatcagtgatattattcatctcgatacatatacgctggatgattacgcagataaaatgggtgatgcccagaaaaccagacgcgacacgatcacggcagtcgatacgcttgatgaatccctgaccgctgaatatcaaaacttagaatctctggacaacgcagtgctcagcaaatattcccttctcatgcaggccaccagcaacgggaaaagcgcctcccctatgtactatgacaaaaaagccttccacagcaatgaaatctacaaaagcgtcatggcgacagaaaaacagggcacggactatattgacgcaaaagcccagcaggccgaagcaagacggcttcaggaaaaggctgaagaagaagccaataaaccatggtacgaaaaaacatgggacggcatctgcaactttaccggcgaagtcaccggctattatgattataaaagagcagccgaaggtgttgatccggtgaccggcgaaaaactctccaccgcagaacgcgtcacagcaggagcgatggccgccgccggattcataccggtcgtcggctgggcgggccgcgctttcaaaggcggaaaagccatttacaaaaccggaaaaaccgtcattgccgcagaacatgctttagatgcctataaaaccggaaaatccttagacattctcaaaatgacagaaatgggcgcatacggcctcgtcgcctcaaacggattcacagaagccgtcacaggacgggatatgttcggaaacaaagtgtctgaggaaaaacggaagcaaggggcgctggaagctgcgctgagtttggttggagccggtgcattggcgaagcatgtaaacaaaggcataccgcttgcaacccattcaaaagttcaaaaagctaacaagacactagaaaaagttaaacaattcaaagtcccgacaaacgtccgcgtgtacgcagaacgcccagtaacagcgaacggctttacgtacggattcccaacagtccgtgtcgatgtggaaaagacggctgttaaagaacttgggattgtgaagatggcgagtagccagtcaaaaaaaccaaaatggttggaaaaacctgaggggatgactcaaaatgattatgttgctcataatggtactaactacagtaaaaagaaacggactgaagaatacaatgctgcgctagctgataaagagaagatagttggagacaattcaaatggatatcgtttaaaagaaccaactaactggatggaagaaagaggtatgatacaaataaaagaaagattaaaaagaaaatcttggtcagatagagatgggtttaattggcaatgggattcccagcatggtaaattagaaaagtggaaccgcagaagaacagagcatttaggagagtttgatcctgtaactggtaagcagacgaaaaaaggcgagccttcaagaagatgggatggttaaaactatggaacatggaatcagatttattaatgaataccctgaaatcggtgaattgcttcatcgtctatttgtgaatagggaattagacgaatggtacaagagcaaatgcgcagagaaaataaaagtacctgatgaatttaatcaaataaaaggtttgaaaaaaattgaagttagagatttaaacaatccttcaggagaaattgatatccatttgcaagatctttctggggaaaatggttttcatttagaacagcaaatcaatatgaaagtatctaaattggttcctgtttatgtattagattatagttattccctaagacacgatttaatagatggcgcttatgacattgtaggaaccgctgaatctttagaattcattcagggaacgaactatattaataaaataatgcaagagaaagggtttatcgaactcagttatttgtatgattactacgatactgtgtatgagtggagtgaattgccacatatacagcctttcaacaggagattaacattaggagatgccttgtttactgatgtattagaattgctatagttaagagcttgccttgttgttatcggcaagtttttttataataatttaacaatgtggagtacaaggagaagcagttatggatagagaccatatttctcaattgctgccattaaaaatctgtaatggctggtctgtagtactgaacaatttaagttcagaaaaaagaatgcaagaaaaatatgaattactaaaactacaaaatgaaaaacgtaatgctgttattaaggtaatatttgaaaatgattaataccatgtcatagtagcgggcttaaaaacagataagatttataaagaagactcttttaatgaaatagaacaattattggaagagttggaatatcaaatctggactgtgggaagtggggttttagagggtttgcagcacctaagccaacatgttcccaatttcttaaggcttaagataccagcggggtggactgttgattatattccattaaaagatactgaccctaaaactctagaggaaaatgatgatgcttggttatttgactttaatcaagatctcctgcagtttctcataaaactaaaaatttgctgcttgtagggtggtacccagaaggggatccaaccggcagttatggcattgaactgataaaaaacaaagattgggaaaatcctttagaagatattatgtgtactgaacttaaagaattacttaaacaattggatcttatttttatgaaagaaatgaaaaatgaattttaataaaaagcagattatactatctgcttttttcaatgaagcatatggagtcttcgctagatcgaaacacaggacgattgagcgcgaagactattttaagagaggaaaacaagtgaaatgaaaatacatcaaattcacgattttgaacaaaaagatgaatcggattttattcgaactcaacaatctcttatacataaaatcaacctatcccccgtcatccatccagactccgtcaacaccagcgcaggcgtcgacctcgcttattgggagcaggacggggaaccgtacggggtgtgcagtatcatcgtgattgacgctgatacaacagaagtgattgaaaaagtgcacagcatggggaaaatcagcgtgccgtatgtgtccggttttcttgcgtttcgcgagctgccgctgatcatcgaagcggccaaaaagctggagacggagccggatgtgtttttgtttgatggcaacgggtatctgcattacaatcatatgggcgttgccacccatgcggctttttttctggggaagccgacgattgggattgcgaaaacctatctcaaaatcaaaggctgcgattttgagatgcctgaaaatgaagtaggcgcctacaccgatattctcattgacggcgaggtatatggctgggcgcttcggacacggcgggacgtgaagcctatcttcttgtcttgcggacataacattgatttagaaagcagctatcagatcacaatgaaaatgatcaatcgagaaagcaggctgccgatccctgtccgtctggctgaccttgaaacgcatgttttgcgaacgttttatcggaaaaatcacatgaaacacttggagctctaagccaccaagtgttttttttgtatgcctggtgtctgctttaaaaaaccttgtcgtccttgcagcaggtttttatttgaatgtttttcgcgtcaaatcgataaatgcctttaatggcgcagacatccacttgtccttatgccatgctagttgagtaaaaacggggcattcattctgccagttgagttctttcatccgtccttcggcaatatcgtcttttactgtcatttcaggcaatagtccgattccgagtccggccatcacgcattgtttgatggcttctatgctgacgaattctaatttattagggtagactccggcgtcatgtaaagtgttctcaaagagcgtgcgatatgaacagccgtcctctgtcagcagaagggtttcattttgaagatccttcaatgctgctggtgagtctgctggaaaaggatggtcattggcggctaccattttgatttcatcctgaatcagagattcaacgtgcagtgcgtcttccgaccgattcacatccaaaatgaaagtgatatcaagctggccctgcaagagctgttctttcgcttgttcgttggaaatatacggtttgaatataagctttacttgaggaaaagcctgtttgaattcttttatgataggcggaaggcggtatgtgcactggctttccgtcgcgccgattttcaaggttccggttgtttctcttgcttgatttgcggccatttttgcttcttctgttaacgcaatgatcttctccgcataggatttgaacgttttgccggcttctgtcaggaaaagccgcttgccgagccgttcaaataaaggagtcccgatttcttcttccagtgatttgatctgagaggtaacgcttgattgtgcatagttaagcatcttggcggttagggtgaagtttacgtgttctgctgcggtaataaaggtgatcagctgcttcaattccatttgatctcgccctttctaaatcggttttatcgattggaataatcgaaataatcatctgtattgattgatgaatccattatatgatgaagaaaatcattcgtaaacaaaggagcagatgcatcatgaacattgcggttattcatggcggaacgaggcctggcggaaatacggatattcttgcggagaaggctgttcaaggattcgatgcggagcacattcatttgcggaaatatcggatccggccaattgaagatctgcgtcacgcccaaggcggctttcgtcctgttcaagatgactacgattctatcattgagctgatattaccgtgtgatattcttgtattcgccaccccaatttattggtttggcatgtcagggacattaaagctgtttattgatcgctggtcacagacgctgagagatccgaggtttcctgattttaaacagcaaatgtcagcgaagcaggcatatgtaacagcagtgggcggagacaaccctaaactaaaagggctgccgctgattcagcaatttgaacatatttttcattttatggggatgtcctttaaaggctatgtgctgggagaaggcaatcgtccgggtgatattcttcatgatcaacaggcgctgtccgctgcgagccgtttattgaaaagaagtgatgcgatatgaagctgctgctggttatctctggtatgttgattcttgcactctttctagcttggaaagcgccgacttctgtttggatacaggctgaaaccaattcacctcaggttcagcaatctgtgagaatggcaggcgcaacgctgcaagtcaagcaaatcatcaagagtgatgcaggcgaagaaacagttgtcatatcaaatggtatttccgggccaaaataaaaaagcacctgtccaggtgcttttctttataaatgaggaatcacaagccctccatacaaaaacgccgcgataatcagaaaggccggatgcatcttgaattttgtcaagacaaggagggaaatccccgcaatcactatcgcttgaacccagccgatcgctttgatgccgtctgcgccgatttgccaggtaagaatgagcatcatgacggcgatgacaggctggacggacagcgtcatacctttgatgacgggggattggcggaagcgctgaatgacgcgcaagaggatgatcaatgcgagcgccgacggtacgacggtggcgatcagcgcaatcaggaatccgggccatccgcctgcgctgtagccgacatacgccgcgattttggttgcgatcgggcccggcaatgcgttcgcaagtgcgagcatatttgagaattgatcgtttgagagccagctgtatctgttgacgacttcttcaaacatcagcggaatcgacgccggtccgcctccatatccgagtacgtttgcgacaagaaacgccataaatacataaatcaagatcatgaggccggcattcctttatcttttgaacgtttctttgtgattttgtcctttaatttaaaatgaaacgcgccgtatgccaagaaaatgataatgacaaagccgggattgatctgtaacgtttgcaggccgataaaagcgatgataaaaaacaggatgcccgtgacccagccgaaacctttaagcgctttttggccaaactcgtacgccatgatgccgagcatgacggcgatcaccggtgttacggcgccaatcatgccggcaacgattgctgagcggcttaagacattgacagccgcaaacaagcccgccatagcgagacatgtaggcagaatatgtgcgagggttgccgcgattgcgcctaacgtgcctttcagcttgaagcccagatacgcagccatttttgtggcaatcggtccgggaagcgcattagcgatcgctaatatttctccgaattcatcatcatctatccatttgtatttattgacggcttcatggcggatgagcgggatcaccgacgggccgcctccgaatccgagaatgcccgttcggaccatcgccgccgtaatgtcccaatagggatgtttcatggctatgtcctccttacagcttcatgcccgttctgcttttataccgtttaatcagcatttggcagtcgacgctgacgacgcctttttgcgtatagagccgttttgtcaaaaactcttccatctcctgatcatttgcgaaaatgccgtgcatatgcagcttgctcggtccggtcatatgataaaggcttgtcaccgccggctccttttcaagctttaatgcggtttcctccaaatactgcggctccacctccacgttaaaaaacacggacacatgacggccgattttcgccgggttgatgacagcggtgaatttttcaatcacaccggcatccagtaaatgctgaatgcggtgctgaaccgccactcgcgacaggttaacccgctttcctaagtctgtataggaaatcctcccttcctcgtgcaaaatcgagagaatctgtttatccgtttcatcaaggacaagattcggaatgctgtactcatgttccaaccggcttcaccttccttcatttggtggatattattgtatcatgaaatgttacggtatgaaggggaaatttttttattgttttcgttacgtaataacttaggattatttcttatcggaaagtaaatagtgtgtgagcttttctttcaggaaggtggataccggtgaagccgctttttatacttaggaaaatttgtaaaggggcttgccatgaatacttcaaccatcggaacgaaacaaatggtcgtcagtccgcattatcttgcttctcaggcgggggccggcattctggaaaagggaggaaacgcgtttgacgcggcagtggcggtcagcgcctgcctggcagtcgtgtatccgcatatgacgggtcttggcggggattcattttggctcacttaccataaagaaacgggacgaatcaaagcttataacgggagcggccgttcagggaagcatgtgacgagagacttgtatcggggcagagaagcgatccctctgcgcgggccagaaagcgccattaccgttccgggaatggcggacagctgggatgccgtgctttcggcgtacgggcgtctttcgctcgctgaggtgctgaagcctgctcttgattatgcggcaaacggattcccggtgtccgccgaccagtgcgcccacacagaacgcaatctcgctcttttagcctcgatgccttacacctcggccatttttacgagaaacaaaaaagcgcccatgcccggtgaacggtttgtccagaagaatctggcggccagcttggaacagcttgccgagaaaggcagaagcgctttttatgaaggagatctcgctcaaagcatcacatcctttctgcaaaacaacggcagccgtctgacacttgatgactttaaagcccaccgcggcgagtggacgaacccggtatcctctgattaccgcggataccgcatctatcaggctccgccgaattcacagggctttacaggcttaatgacgctcaatatattggaaaactatgatttttctcagattgaacacggctcctttgactattatcatctgctgatcgaggcgctgaagaagagttttcagcaccggaatgaagtgctgactgatccggcattttctcatattccgctggatcggctgcttgataaacggtatgcaaagcagctggcggaagaaatcggtgacacggctgcgccggcgctaagccgtccggtcggaagcgacactgcttatgccgccgtcagagatgcggaaggaaatgccgtttcctttatacagagcctttattttgaattcgggtcagccgttacggcgggggagacgggcattctgctgcaaaaccgcgggtcatttttttcgctggatgaatcccatgtcaatacacttgaacccggcaagcggacgttccacaccctcatgccggcgatggcctgtaaagaaggaaagccgcacatcctgtacggaacccagggaggagaaggccagccgcaaactcagacagcgatgattacgcgcatcattgattacaaaatggacccgcagcaggcgatcaatgagccgcgctgggtctgggggcggacatggggagaggagtatgaagggctgagggttgaaagcagaatcagccctgaaacgagagaagccttaaggcagagcggccaccgcgtcgagaccgttggtgattttgacgggcttatgggccatgcggcagcgatcgtcattgatgaagaaggctttctccaaggcggggccgacccgcgcggcgacggagcggccgcaggagtatagagcatgatacgctaactgatgaaaaaaataagcacgccaagagcggcagaaagacctgcgtaaaacgaatcgtacacatattgcttttcctcccgccggtgccgccattccattaagccgctgcagcaaaatagcatgaaaacaactcccgcaaatacgtacatttcattgaacaaagtcaccgctgcgatgcccgtaataagcagtgtgatttcgattaatcgatgtgtgccgtttatcggcttctgctttttaacagcctttggaaaatgaagaactttgacggcaaatacttgaaacataaggctgagcaaaataaatacggctgaaaaaatcagtaactgaatgaaatccatcgtctcctcctaaaaatgtcactcgtttcatatgggtgagggccttgtaagtttcagcattctataagacattaggctgagtttaatggtaaaagactcaaaaaagacccctttcgaaaggggtctttttgactagtttcttctattataatggttcctgcttcaggtcgggcggacaagcgtatatgtcttcccgagtctgacgtattcattccccgcgagccttgccgcaggcttcagctcatctgtccgtatgtagcctttatcggcgtcatatacttggtcattcaaatgaaaacaaacgactctgccgatgatgaggtctgtcgtcgtttctccgctgtcattttgaaacggaagatggcgttcgagtatacattcaaacctgacttttgcttcttttataccgggaacgctgatgcaggcgctgtctgtcacagaaaggtctgtcatgccaagttcactgacatcaggatcaagccttgccgccgttttgttaatgtcttcaataatggactcatcactgacgtgcaccacgaattcccgatgagcgattgcgtttctcgcggtgtctttctgccgtccgtccgcgcggctgacagagatggccagaagcggcggttctgcggagacaacgttatagaaactgaagggcgccgcgtttacggcgccgttgatggatgaccgcgtcgtgacaaatgcgatcggccggggaacgactgtgcccgaaagcaatttgtaggtgtcttttgcgttcagttcgtctgctcgtaagatatgcatgatttcggccgcctttctttatcgtatgacctgattatacagaaagaaaattcggaaacacaacaaaagaaaaccggctgcatatcttatcacgtggcatatatctgattgaggaaaaaggcttccgtttagccggcagcctatttacaaatggcgttacttgtagtttttctttacaacccagatgttcccgtctttccagtactctgttttgctgcagtaatcgtcttttttgcaagggtcttttttatgaggacggtaaggttttttctgcgtgcgttttttcttgcggcggcatgattttttgtggctgcgagattttttgtgagaacgggattttttatgactgcgagattttttgtgagagcggcgcgattttttatggctgcgagattttttgtgagaacgggattttttatgactgcgagattttttgtgagaacgggattttttatggctgcgagattttttgtgagagcggcacgattttttatggctgcgagattttttgtgagagcggcacgattttttatgactgcgagattttttgtgagaacgggattttttatggctgcgagattttctcttcttactgctttttggttcttggtacaaataatcttccaatccctcggtgcttgcggactttactgcttcttcgatatcagaatgggaatagtggcccattttgaaacctcctcatgatatatgttttaaggatgcgatccttactaccacatagtacgcatgaatgaaaaaagtgtatgtgtgattcgctgagttttatataaatagcacagcctaaattaatacagggagggttactgatgaaagaccaatcaacattgcctctataccagctgtttattcacccgaaagacttaatggagctgaaaaaagacatttgggatgatgatccggtgcccgcggtgctgagagtgaatcaaaaacggcttgacattgatctggcgtaccgcggctctcatataagagattttaagaaaaaatcgtatcacatcgctttttattcgccgaaaacatttcgcagggcgaaagagatacatttaaacgctgaatacaaagatccgtcgatgatgcggaataagctgtctctcgatttcttcgcggagcttgggacgctgtcaccaaaggcgaatttcgtaaccctgcaaatcaatggcagacatgagggggtgtatcttgagctggagtcagtggatgaatattttctggcgaaacggaatttggcggacggggctgttttttacgcggttgatgacgacgccaatttctcccttgtcagtgatctggagcgggatacgaaaacatcgctcgaacttggttatgaaaagaaaacgggaacgaaagaagacgatttatacttgcaggacatgatctataaaattaataccgttccgaagtcagagttcaagggggagatcgtcaaacacttggacgccgataagtatttgcggtggcttgcgggcatcgtgtttacctcaaactacgatggatttgttcataattacgctttgtaccggaatcatgaaacgggactttttgaagtcattccgtgggattacgatgcgacgtggggaagagacattcacggtgatcggatggaggccgattatgtcagaatacaagggtttaataccttgactgcaaggcttctggatgaaccgtatttccgcaaagcgtacaaacagcttttggaagaaacgcttcagacccggtttaccattgaacatatgaagccgaaggtcatgtcactgtatgagcagatcaggccgcatgtcgcaaaggatccttataagaaagaggagattgattgctttgaccgggagcctgatgtgatttgcgaatacattaaggagcggtccgccttcatcagcagtgagttagagcggtggaatatctgatttggaaatgaagaaagattttttacaaataggctggtgaatcagttcccgaaaataatcgtgatacgtatatatgcattatgctttttacattatgagaaaaatgactaggaggacaatagatgaaacgcaatacgaagcggcatcggtctgatgacaactttttgcatgcgatggaaggaaaagtaattactgtctaccggggaggcccggagtccaagacagggagattagcagacattcaatcggattatatcgctcttcaagttgataataaaatcgtttattatcaatggaaacacgtgaaaagtgtgacggaaaatacgagtgaaaccgtatcgccggccgaagcggcagaatgtgaaaaagctgatgattttcaagatctgatcagccggatgaccaatcgcacggtgcaattgaatcagggaggtccggaatcgaaaagaggaaagcttcacgaaacaggggatgattttctcgtgctggaaacagaagatgacggaatcgtatattttaacgccgatcatgtcaaaagcatcagcgcggaacaagaagaggacggccaggaggaggagcgcccggaatttgaaatggctgatgattttcacggcatatttaaacgcctgatccacaaatgggtatccatcaaccgcggaggtcctgaagccgttgaaggtatacttgtggataattccgacggccactacactcttgtgaaagataaagaagtgctgcggatctatccttttcatatcaagagcatcagcgaaggggcaaaaggagcagccaaaaaagaggagaataaagacgacgagaataaaggcgggaaagagagcgccgaagaagaaaagtcacatgaagaagaatctcgcgaagagcagcgtacttcctctaaaaagtcgaaaagatcgtcaagatccgttcgatcctcaaaacgggaggaagagaactcttatagctacgccactgtattaaggacaatagattataggtggaaacacggccgtaaatgattggaaagattgtccgtaaacgcgggagaggggggaatgaaatggctggattaagcagatttcttgataaacaagtcgatattgagatatcggggaatacgacattttcaggaactcttttggatatcggtcaggatatcattgtgattcatgacggccggacgtttctttatattccgctgctgcatcttcagaggatgacattgacgctcccggacgaagagaataaagaaccgtacgcaagaaaaaaaagtccgcatcccgaaaaacaggaacattccttttcttaccggaataccctccagcatataaaaggcagatttacagaaattttcgttacgggagaccgttccattcatgggtatgtgacaagtgttttaaatgattattttgttttcttctctccggtttataagactcttttcatctcgatgcatcatttgaaatggctgacaccctattccgatgagcagacgccgtatacattaaacagttcagagctgccggttgttcccgctaatgtgccccttgtccggaattttgaggagcaattaaaaagatatgtcgggaagctgattattctggatttaggagatataccgaataaagtggggctgttacaggacgtctcagataatattcttgaattgaccaatgcagacggggatactgtcttttggaaattgaatcatttaaaaaccatgcacctgccataaatgataaaactgcctctcttatacagcaggcagttttttttcatagctaaaggtaaatccagctgatccaaacatataaaacggtaatggtaaacacgacggtgagagggacaacgacaatggtcgttttgatatattctgaccaagaaactttttcgccgtgctgtctgatgatatgcatccagatcagtgtggctaatgtcccgatcggcagaagcaatgatccgatatcactgccgataatattagccagataaatgatttttacggttaatgggtcgatggacatttcagttaatgtcaaagtgctgatcattaaggcgggatggttattgaacaaattagagaggacggatgtagcaatgcccataatagatgcagcgtgggcaatgctttgtgagacataaggctcaatagactgaacaagcaatgccgtcagtccgatattatgcagtccgtaaatgataatgtacatcgtgaaggcaaaaataaagatatgccaaggcgctttccttaataagtccgccggtccgatttttaaataaaaccatctccagcaaagcaggatgactgaactgatgacagccacgagcgaaacggatatgccgttgtaagaagctgcaaacagactgatccggacaaacaatacaaataccaaaacacaaaacatgatgttcgtacggctgtttttttgggacaagtctggcggaggctgaagcggatgatatcgtttgtgttccagcgattcaaaatgaaccggaatatcggggagctgtttcggcaaacggcggtagaaaacggcaaacagcagaaaggccataaacaccagtcccagcgtgccggggataaacatcatattggtgtacaaataaaggtccatgcctatcattttgagagaaattaaattgacgatattactgacgccgatcggggtgcttgccgccgtcgcaattaatacgccgcttattaaatacggtgttttctgatgtcttttaagtccgagatattgtaagaccaatagtaaaataggagtggtgattaagacgctgccgtcattattcagaaagagcgtcattgaaaaacagagcaggttggtcagccaaaaaagccggatgcctgatcccttggcgcggtgaagcagtttggccgccgcccagttaaaaaaaccgaagctttccagcgcgatcgccattatcattgtggagataatggttattgatgctccggtgacttttgaccctatatcccccaaatcatgaaaggaaacggttccgcataacaaaacgagaatggcgcccagcgacgccggaacggcttcatttaatcccccgggtctccaaaatataaaaataatggtcacaaagaaagaaatcagggtcaaaatgacggtaatatgtgtaatgtgttctgcctccttttcgatgggtcattgccgccccgttatttttatccctcctgatcagttgtactgtatgtatacgggtacaggtcgtaaggtgtactgagcgtttctaccaatttagtaaaaatccataaaagcacaaaaaaaagaggctgctttcggcggccctcttttttatgcattttccttatccgcctgcaataaagcctggcgcttattcataatatccagaaaatgtttcaggatcggattttgattatccttgcggtaggcaatgacccattcggcagtgagctgcgcctgattaatgccgcggtaggcgacttcgagattaaacagctttttagcagaagaaggcacgaaggttacaccgataccggcactaaccaatccgatcaccatttgatactccgtcgcttcctgaacgattttcggtttgaagcccgcctgctcgcagtagtttacaaactccaggtataaagtcggccatgtttctttcgacagtgtgataatcggttcattttttaaatcctgaatgtcgattgtctgtttagcggtaagcgggtgctgcttcggcaaagccagaatgcacgggctgctctgcaccttttccatatgtaacgcggaatgttgtaaaggcggatgaaggatgccgatatcaatgttccccttcagaagttcttcctgctgtctgaaagaagaaatttcacgcagatcaagcttgacggaggggaatttttcgcggaattcccgaatgatcggcggcagaaattcatatgtggccgagccgacaaaaccgacgacaaggcggccgagctctccccgcgccgttctctgcgccatttcaatcgctttgtctatttcttcgatcgcgtttctgctgtgttttaaaaaactttctccggcagctgaaagctctacaacccgtttcgtgcgctttaataaggtcacgccgacttccttctcaagctgtttgatctgctggctgagaggcggctgtgtcatatttaaccgaagcgcagctttgccgaaatgaagttcttcggcaacggcaataaagtattgaagatggcgaagctccatccttatccattcctttctctttgttaattattcgtgaaacatattaatcatacggcgaattgatattggaggtcaatttccaaagagtgtatagtgaataatatcacaaattacttaaaattttatatttaatatgcataataaggagtgagggtgttggcaaaagcaacaaatgaactaaaaacctctgaaaaaaatcggggggcggagcttgttgttgattgcttagtggagcaaggtgtcacacatgtttttggcattccgggtgcaaaaattgatgcagtatttgatgcgttaaaagataaaggacctgaactggttttatgccgtcacgaacagaacgctgcatttatggctgcggctgtcggaagactgactggaaaaccaggcgtttgtctcgttacttcaggcccgggggcatccaacttggcgaccggcttgttaacggctaatacagaaggtgatccggtagtggcgctggcgggtaacgtaattcgcgcagaccggttaaaacggacacaccaatcattggacaatgcggcgctatttcagccgattacaaaatacagtgtagaagtacaggaaacagggaatataccagaagcggtaacaaacgccttcagggcagcgtcagcaggtcaggcaggcgcggcttttgtgagctttccgcaggatgttgtgaatgaaatcacaaatgtgaaaaacgtacgcagcgtgccggcgccgaaacaaggccctgcaccggaagaggcggtcagcgcggctatcgcgaaaatccagacggcgaaacttcccgttctgttagtcggtatgaaaggcggaagaccggaagcggtaaaacaaatccgcaaactgcttgccaaaacaaaactgcctttcgtagaaacgtaccaaggggccggcacattgtccagagagctggaagaccaatatttcggccggatcggactgttccgcaaccagccgggcgatcttctgcttgaacaggcggatgtcgtattaacgatcggttatgatccgattgaatacgatccgaagttctggaacgtaaacggtgaccgtgctattatccatcttgacgaaatccaggccgatatcgatcatgcctatcagccggaattagaattattaggcgatatccccgctacggttaaacaaattgaacacgacgctgtgacatttgatatgggcagccgtgaaaaagaagtgctgagcgagttaaaacagatgctcacagacagcgagaaggcgccaagcgatcataaatccgacagagtgcatcctctgcaaatcgtccaagaactgcgcaatgcaattgatgacgacgtaaccgtcacttgcgatatcggttctcacgcgatctggatgtcccgctacttccgcgcttatgagccgctgaaactgttgatcagcaacggcatgcagacattgggcgtagcgcttccttgggcgattgccgccacattggtgaatccgggtgaaaaagtcgtatccgtttcaggagacggaggattcctgttctctgcaatggaattggaaacggcagtccgcttaaaagcgccgatcgttcaccttgtatggaatgacagcacatatgatatggtcgcattccagcaaatgaaaaaatataaccgtacatcatgcgtagatttcggaaacattgacatcgtaaaatatgcagaaagcttcggcgccaccggcttgcgcgttgagtcaccggaacagctggcagacgtgctgcaaaaaggcttgaacacagaaggccctgtcatcattgacattcctgtcgattacagtgacaatgtccatttatcaagcgacatgcttccgaagcaattcaaagaaaaaatgaaagcaaaagctctctagcactctgcgcaccatgacctgttttctaaaacagcccaatttaaaaggagtgaagggaatatgaaaaacgcaagcgacatccatatgatgagccgcggagaaaaaggctcacctgaggatcaaatctatcaagtatccaccatgacatctctgctggacggagtgtatgacggagattttgatatggctgacattccgaagttcggtgatttcgggatcggcacgttcaataaactggacggcgaattaatcggatttgacggcgaattttaccgtctgcgcggcgacggaacggctacgcctgttaaaggcggagacctgtcaccattctgctcattcacatttttcacgccggacatgacgcatacgatcgacggcgaaatgacccgtgaagaattcgagcaggaaatcgccagccttctgcctagtaaaaacttattttatgcgatccgtttagacggcgtatttaaaaaggtgcagacaagaacggtagaacgccaggagaaaccgtacgttccgatgattgaagcggtgaaaacacagcctgtgttcaactttgacgacattcagggtacaatcgccggcttctggacgccgggttacgcaaacggcatcgctgtttccggatatcacctgcacttcattgatgaaggacgcaattccgggggacacgtgtttgactatgtcattaaagattgtaaagtgaccatttctcaaaaaatgaatatgaacctcaagcttccgaatacggcggactttttcaacgcaaatttagataatccgaattttgcgaaggatattgaaacaaccgaaggaagcccggaataaaataaaaaagaaagcctcatttttctcgggggctttctttttatttggctgaaccggcaaagattaggtaaaatacagtcaaaagggaaaggtgtggtagctgtgaaagtattggtattagcggttcatcctgacatggacaactcagcggtcaataaggcgtggacagaagaattaaaaaatcatgatgacatcacggttcgtgagctttataaagaatatccggacgggaaaatagatggggaaaaggaacggcagctgtgtgaacagtatgaccggatcgtatttcaattcccgctgtactggtacagtgcgcctccgcttttaaaaacatggatggatcatgtgctggcgtatggctgggcttacggttccaaaggaaaggcgctgcacggcaaagaattgctgctggctgtttctgtaggtgccggagaggatgcatatcaggcaggcgggtccaaccatttttcactgagcgagctcttaaggccgtttcaggcaatggctaattttacgggaatgacctatttgccggctttcgcgatgtacggggttagcagcgccgatgctgcggctatccgtgacaacgccaaacgcctggcggattacataaagaagccattttagagtcgtatgcattcatcttcatccgacaatatttcctgagaaatatttcgaaccttagacgtttctgactgctcaagaaagaaaaaacggatttcgcgctgaatttgcgaaatccgttttgatattatgtcagtttttgcagatcttttgtgctgatatatcccgttgcgcccccgtaatcgacaagcgcccagccgaaatcaatgccgccgccggctgtctttttccatccgaggaaagaaacgctcgtgtttttggcaagggaagctgtgaccgcttgtttgtctgtatatacttttgtttttgccgtcgtttttacggttgttgcttctttaacaatataatgagtagatacaaatcctgtttttccgtttttataatgtacttttgcccagtcagcgttctggaatgaaacgatctttaagctgtcgcctaaatgaagggtatcagctctcggactggctgctgatgcttttgttctcacgttcaatgcttccgcggaaacgagataagagtcaagcgggtagctgtacagatcgtcaattttgaccgcttcttgcgcgtgtgtctcgggaagaggcgttattccggcagctgaagccgctgatattcccgctgcaagggtcagaatggatgccgctttggctgttttcttcatctgtatctctccttttacttcatcctttcacgttttaccggaagtctaaacatcagccggttatttttgcgtttgaagtttcaatggagcggaaatggtttttttgactttttttcctttgagcacctgctccgccgcttcggccgccagttttccgatcagctccggctgctgggcgaccgtggctgtcagcttcccgcttttaatggaagaaatcgcatctttatttccgtcgaaaccgacgaccaaaatgtgtttgcccgagctgttaatcgcttcgagcgccccgagtgccatttcatcattatgggcgaacacggctttgatatccgggtgtccctgcagcaggttttccatgacggtcaatccttttgtgcggtcaaaatctgccgcttgctttgttacgacatccagctttttgtcggcaatatgatgaaagcccgttccgcgttcccgtgtcgcggatgcgcccggcaccccttgcaattcagccactttggcgccttttccgagctgatcggcgaggtagtcagccgccatttctcctcctttgacattgtcagaggcgacaagcgtttcgactttgccgtgttcggctgaacgatccagcgcaatgacgggaatgccgagggaatttgccgattcgactgctgttgaaatcgctgatgaatcggtcggattgatcagcagcgcatcgactccctgctggatcaaatcttctacgtcatttgactgtttagatgaatcattttgggcatcgacaataatgaccttcatgccccgttttttggcttcctttacaacgccttcttttaatgaaacgaagaacggattgtttaatgtggagacggagagcccgatagtgaattcttttttatgttttgtgtttgacggttttgcccattgcggcggttcaagtgaacaggcggacagcaaaaacagtgataatgccgcgatcgtgatgatggctttcttcataatggtcctcctactatgccgattttttgcggtccagcagcaccgcgattaaaatgacgattcctttgacgacgagctgataaaacgatgatacgccgagaaggttcaagccgttgttcagcgtaccgataatcaaaaccccgatcagcgtaccgatgatgcgccctcgaccgccggacaggctcgttccgccgagaacgaccgctgcgatggcgtccagctcgtatgattctccggccgtcggctgtgcggaatttaagcgtgatgtcagaatcgctcccgccagcgccgataataaacctgtcagagaatagatcatgatcttgatgcggggcactttgattcccgatatcagcgccgctttctcattgccgccgatggcgtatgtccggcggccgaacggtgttttgtgcagaagaacccacagggccgcaaatgcaatcagcatcgtaatggcaggtacggggatgccgagaaaataaccgcgcccgaataattgaaatgcgtaatttgaaccgagccccgtaatcggatttccgtccgtatagacgagggtcagtccgcgaaagacggtcattgtcgccaaagtggcgatgaacggcgccatttttccttttgtgattaataatccgtttatcatgccgagtacggcgccgatcacgcagccgatgatgacggctaagatcgggtcgatgcctgagaccatcatacctgcgaccactgcgctcgataaggcgaggatggctccgacagagagatcaatgcctcccgttaaaatgacaaacgtcattccgaatgcaatcagagcgttaatcgcaacctgccgaagaagattgagaatattgagaggttcaagaaaactcgggtttaaaacggaaacgatcagcacaagaatcagtaagccgagaaacggaccgagtttttgcgtgaaggtatgaatggaaaatcgcttttgttcagttgatgttattggttcagttttcatactgctgccctcccgtggcaagtgtcatgatgtgttcttgtgttgcatctgccgcattgatttctccgctgatgcgcccttcgtggacgacgatgattctgtcactcatgccgagaatttccggcagctcggaagacaccatgatgatggcgactccgcgatcggtcagttcattcattaatgaatagatttcccttttcgcgcctacgtcgacgcctcttgtcggttcatcaaggatgaggactttcgggccgattccgatccatttggcgatgacgactttttgctgatttcctcctgataaatgccgggcggcggtttccggagatgcagtcttaatggtcagacgcttgatgagcagctcaacgaactccgcctcgcgttttcggtcaatgatgcctttcggagagaagctggtcaggttcggcaatgagatattttcacgaatggacgtatccagcagcagcccttcatctttgcggttctccgtaatcaggccgagtcccttgcggatggcatcgtacggaccccgaatgccggtttttcggccggaaatccagacctctccggaatcgagccggtcaattccgaacagcgccctcatgatttctgtccgtccggcacccattaagccggaaacgccgaggatttctccggcgctcacatggaaactgatctgtgaaaatcttcctttttttgaggcgtttttcacttcgagcaccttatcgccgagtgacggcgtgcgggtcggataccgatcggtcagctcccgcccgaccatttttttgaccacttcatcaaaatgagtatctttcatatgcgccgtatcgacagtgaggccgtcccgcataatggtgatccggtcgcaaattgaaaatatctcttccattcggtgagaaatatagacaatggatacgccgtcccgctttaacgccgtcatcacgtcaaacagtttgctgatttcccgttcggtcagcgccgcggtcggttcgtccataataatgacttcggcgtttgtcatcagcgctttggcaatctcaatcatttgctgctggccgacggaacattgtccggcttcccggtcaagaggaagagagactcccagtttttcaagctgtgattttgctagcgctttcattttcttcgtttccaaaacgccgaacgccgtcgtcagctctttgccgataaaaagattttcaagcaccgtcatgtccggccatatattcagttcctgatggataaaggcgattccgtgcttttcggcttcctttggattggagaaattcatatttgttccgtttatcgtaatgtttcccttgtcgagccggtagagcccggtgagcagattcattaacgtcgatttgcccgctccgttttctcccattaaagcgtggatttctcccggcagaagctcaaatgagacgccggatagcacttggtttttgccgaatgctttatgaatgtctgtcatgccgatgtgcatgctggatcccttctttctagaaaatcacacccgcctgcaggatgcagttggcgtatggtgtcatttcacccgtccggatgacggcttttgctttctgtgtgagccgtttgaattccgagtgggacatgtactcgatcgtctgcgctgagaaatggctttctatgaaacttgcattctcaggattttcgtctttgatctcggaggcggccatcaccttttcgacggccatctccccggctaccaggctggtcacatcccgaaaggcgggaatgcccgccgttaaggacaaatcaattttagggacgccgtcagggacggggagacccgcatcggcgatcgcgatgaggtctgtatgcccgagatcggctaatactttggcaatgtggctgtttaacattccgtgttttttcatgacagcagctcctcaacttcttttctgaccggcatcccgccttgggcgccgaagtgctgcacggacagggaggcggcgcggttggcgaacaggagcgcttgctcgatgtcccgtccttccgcgagcgcgacggcaagtgccgcattaaaggtatcgccggcacccgtcgtgtcgaccgcttctgcagggaagccgggaacaagccgttccgcggtgccgtctgagtagcgtacgccttgttttccttcggtaatgaacagtttgccgggatagccggcgagcgcttcttctttcgtccggtcaggaaataaaatggatgcttcatgttcgttcggcgtaagatatgcggcattctcaatcgtcgattgtttcagcgggcgggccggcgcgggattcaggataaccggaatttggtgcgcgcggcagtagctgcacacttcttcaacagtttcttcaggaatctcctgctggatcagcacgatatcaatgccgggaagtttttccagcgcacttttggcataatcgggtgagatgtcatcgtttgcgccttttacgacgacgatgctgttgtctccttctgcgagcacaatatgagccgttccgctttttttatgtgtaaccgtttccatatagtccgtattgacaccgtttgccttcaggttttcaataatcgcttttccgtagctgtcactgccagcttttcctaccatatatacgtttgcgcccagacgggaagcggctacggcctggtttgcgccttttcccccgggcacggtttgaaagtctgtgcccagtacggtttctccggctttcggacgccgttcggatgtgacgaccagatccatagaacagcttccgataacacaaatttcactcatggtgatcatcctttctcgtcgtttgtcttcttatataagtcacgggcagttgaatggccgtctctttcggcggctctttctttatcaattgcagcagcaggtttgccgcttgttttcccatctcatatgcaggctggcggatggttgaaagcggcggaaacaaaagcctgctctgcggaatatcgtcgtatccgatgatctgaatctcctccggaacttttttgccgagccgcagcgcctcatggaggacggcagccgccgcaatatcgttgctggcaatgactccgtcggtttcggggtatgctgcaaacaatttttctgctaaaacggcggcatccttgatagaaaatgaagcggcggagatgacattgaactgcgcgcccgctttatacagcacatcaagtgcgccgttaaaacgttcctgagcggtcggaaggtggcctgggcctttgacaagcgtgatgcttgtgcttttgccgcgaagcatttcctcagccgcccgttttccgcctgcccgcccgtcactgaatacggatggggcgccttcttttgtccggtccagaaatacgaccgggtaaaggctgccgctgtattcgggaaggtcggggtaatgggtggccgccaaaataccggcaacttgattttgtttaaatgtttgcaggtagtcgagttctttttccaattcttcatcgctgttgccgatgatcagccggtatccttcccgctgcagctcgtcttcagcgccgcgggcaagctgcgggaaaaaggggttcgtaatatccggaagcaaaagcccgaccagtctggattctcttttataaagagagcgggcaacttcattcggataataattcagcttctccatggcaagcatgaccttcgttcgtgtatcttcatggacgtagccgttgtcattgaggacacgcgagaccgtggcaacagagacgccggcagcgcctgcgacatctttaatcgttaccaacaaacactcccccttcatttatgtaaccgtttacacaaaaagagtaccacgaatcatttcggttggcaacaaaaaaagagaccggggtctcttttagttcacgatgccgatttgcgagatattcactttgatatcagggattatctcgatggaaggatagacctcacgccaattgagccgcttgccccgctcataataatgggtttgatatttccggccgatgccgaggatatccgagttgtgctcctgaatatggctgatcaccgatctggcctggctgttcaaatttgctgatgcttgtttgttcatttggtcgattgccgtataagaattcagtttgtccttcggatattccaagacgcgtgcattcagctttaaacggattttcacttttatatgctgcggatctgtatctataaatacaatctttcgcgtggcatccgtgatgccgagagaaagataattttcaatatccattttgtatttgtcccacagcttcagattaatattagccgatttattaaattgcccgcttaaaagggtcaggagggtcgaatcctgaccgagcacctcagtcactttccgctgtccgctgaacagggcagaaccctctacctttatcgtctgtccgttaatcgataaataaggaagggcgaaatccttatcagccgtcagcatgcttgaacggatggattgcaaattttccatgctgatatttgattccgcattagcgcttgttaataaattcgttaaatacttgctgacgatcaatttctgccggacgatcagcttcagcacttcaatcgcctcgccgtcttttacaaccgccggatgagcgagaagcggacttttcggatctctgtaaaagacatcgagataaggaaaaagcggtttttccgccattttctcaccgattaataagactctttgcttggacgtgtcaatgcgctggtcgacaagcttatccaattgaaaccgcgcttcacggatggtgtgtccggaagcgctgagcaccgtcgtaatgaatgagccgcccgtttcctgttccgcctgggaggactgaaccttccgataggtaatgccgattttatttttaccgtcatgatcaacatcaaggcttgcggtcagcacgagagaaatatctttcaacaaattttgatcccagcagccggcaagtgtcaggcttgcgcacatgagactgataagaaccgcttttttaatgcgcatggcggacaccctttttgcgtacaaggacaatcaataccataaacaacggaaacaaatacacaaacacaatatcggaaatgcggaaaaactgatccagctgctgtatcgttttatctgtgcttgtggcccaaatagacagaaggaagacgagcagggccagcggataaacaaaccggctgtgatctttttgattgaacagcttggcgatgccggtgcttgccaagtaaaacacgttggccagcgttgaaaagacggtcacgaaccaaaacgtcaaaaagagcagatccgtccgttcgataattctgaatgaaacggtttttaacaggtacagcacaggctccgggatcatttttatttcttcggggctgatggtgacaaagcaagtaagagtgatatacaggtaataaaggataatcaagccgtttgaaatcgtcagtattttgtagcgctggctgacggtgcagttgataaggggcccgatcacaagcgccgcctgaaagccggtaatgctgacaagtgtttgctgcaccccggtaagcatgtcttttgcggttccgtgaaaaatcggcataatgtatgtgatatcggcttttcccagtgtgtataaaagcggcagagagatcagcagcaaaaacggcgttaaaataaagctgaacctcgcgatcgcattcagcggggcttgggcgatatagacagaaccgaggatcagcattaagctgatcacccaattcggagtctgagggagcacccagatatccaataaccgtgtaaatacagaaagaatgagcgtgcagagaaacgcgaaatataaaatatacagcacctgcacccctttgccggcaagtgttccgaacacctcctccagcatttcatacaggttcagcttcggaaaccggtgaaataatatcatatacaggctgaaggtaagctggacgagcaatccggtaagcagaatggaaatccatccgctgcttcccgatttcatcatcagtaaatggggcagcgccaaaatgccgatgctgatctgcgtctgattaatgaaaaacacgccttgaagccggctgatttttttaggcttcatcttttctccacccccgaacatgttttatctgctttgaatcttgcggtctcaaataaaaaggccttcttttaataaaccaggccggcagccggataaatgcatcctttaagtcactgaaatgaaacggcgtcagagatgataaatacggaacgccgagggattcaagcttgcacaggttcatcagaataagtccgaagccgaatgcgatgccgataaaaccgaacgaggatgccagaaacataagcggaaatctgagcgttcgaatggacgtgctcatttcatatgaaggaagcacaaaagaagaaacggccgtaacggccacgacgataatcatcatattagaaatgagtcccgcctgaacgactgcgtcaccgatcacgagaccgccgacaatgccgatcgtctgactgatcggtttcggcagcctgataccggcttcgcggatcagctcaatcgtaatctccataatcatggcctctatcagcggagggaagggaatatcaacaatcgaatttttcatggtgataatcaaatcgttgggaatgacttcaaaatgaaacgcaatcagcgcgatataaaaagcgggcagtgtaatcgcgatcataaaggcgaaaaatctcagcactctcaaaaaactggcggaaatccacctcgtgctgtagtcatccggcgattgaaaaaaggaaaagaacgtgatcggcgcaatcaaggccgacgggctgccatccatcatgatcagcacacagccttccatcacgcatgcttttgctttatccggccgttccgtatgaacgatctgcggaaaaatggaaaacgaattatcttctatcgactcctcgataattccgggcgcaagcacgctgtctatacgcaggtatgacaggcgccgcttcacttcctccacaatctccggattggcgatattctcaacaaagataaccgcaacctttgatttggctctttccccgatatccatataatgaacggagagatggcggtcctgtatgtgaaaccgcagctgatgaatgttcgtttccaaactttccacaaacccgtcatgggcgccgcggacgatactttcagattcgggttccataatggaacgcagcggattctgcccgacggaaaacagcttcgctttccttgatgcatcgctgagaaaaacaacctggcctgccaaaatcccgtcaatgagttttctggtttcatccgtttccgcactgctgacggcattcatcgtttcctcaagcggaccgttctgcagggtgtcgcttaacagaaactcattcagcttctgttcttctatcatttgttcaatataaaagaaagcggtatgacggtcctgcagtttgatccttcgtattttaaaatcaccgcaaacacacatcagctcctgcatttcccgtacagccgattcaaaatcgccggaaatccgcttgttttgtttatccgcagacatcagaccgcctcctttcccggttatttgtagttttcagcgggtattccttttttatgcattttataaaatagaggagtttctcgacgttttaccaagaacttcacaattatggatgaatatttcttgaacgaatataaagatttattaaaattatttcaaaagagtgataaatgtcctgtaaatgctttaaaaggagataggctttccgcatataaaatgtgtatttcttgtaaacactccggacccgtctttttctgtcacgtaccagtcattccgctagttattttggaatgggactgaaagcaggatacgggggaaaaatgaatgactttaagaccttatccttaacaaaacaggcagtctgcacacagcggacatagagtcccgaaacgtatgcgcagtgcggaaaacgctgatataacaggctgtaaaagatggattatcattacatctttttcttccggaacgcgtatagtcccattggtccaaatgaatttatgtgcggaaatgtaaacgcatacatttttcttttaaaaaattgaagtaaggtttaagtcctgcctattcccaaaaaaagcaattcgataataggaagaatagcgtcactaatagagaagtttggctcagtgaaagcgggaagattatgttacataatgccgattgagaattcatagtgaagctatatactgatgaatgaatttatcaatacagaaggagatgtcaaaaatcaatgtggttactcattatagcctgtgctgccgtactaatcatcggaatcattgaaaaaaggcggcatcagaagaatatcgatgctctgccagtacgcgtcaatattaatggtatccgcggaaagtcaaccgtaacgaggctgacgaccggaatactgatggaggcgggctacaaaacagtcggaaaaacgacgggaacagatgcaaggatgatctattgggatacacctgaggagaaaccgatcaaacggaaaccgcagggcccgaatatcggcgagcaaaaagaagtaatgaaggaaaccgtagaacggggcgccaatgccattgtcagtgaatgtatggcagtaaacccggattatcagattatctttcaggaagaactccttcaagccaacatcggcgtcatcgtgaatgtgcttgaagaccatatggatgtcatggggccgacgcttgatgagattgctgaagcttttaccgcgacgataccgtataacggtcaccttgtcattacagacagtgaatacacagacttctttaaagaaaaagccgcagagcggaataccgaggtcattattgcggataactctaaaattacagatgaataccttcgaaaatttgaatatatggtctttcctgataacgcttccctggcgctcggcgttgcccaggctcttgggatagatgaagaaacggcgtttaaaggaatgctgaacgcgccgcctgatcctggcgccatgagaatcctgccgctgctcagcacgaaggagcccggtcatttcgtaaacggctttgccgcaaatgatgcatcttctactttaaatatatggaaacgtgtaaaggaaatcggctacccgacagatgaaccgatcgtcatcatgaactgccgcgccgaccgtgtggacagaacgattcagttcgcaaacgacgtgcttccgtacattaaaacgaaggaactcatactcatcggcgagacgacagaaccgatcgtcagagcttatgaagaaggcaagattcctgccgatacactgcacgatctggaatataaatcaacagacgaaatcatggacgtgctgaaaacaagaatgcaaaaccgtgtcatatatggcgtcggcaatatccacggttcagcggaaccattaattgaaaaaatccaagagtataaggtgaaacagctcgttagctaggaggaaaaggataaatgttcggatcagatttatacatttcacttattttaggcgtgttaatcagtttaattttcgcggaaaaaacaggtatcgtacctgccggtttagttgtgccgggttatttagggctcgtttttaaccagccggtctttattttactcgtactgctggtgagtcttcttacatacgtgatcgtcaaatacggtttatccagatttatgatattgtacggacgcagaaaattcgcagctatgctgataacgggaatctgcttaaaaatcgcccttgattttctttacccgatcgtaccgtttgagatatcagaattccgcggaatcggtatcatcgtaccgggtctgatcgccaataccattcagaaacagggattaacgattactttcgccagcacgctgttcttaagcggcgcaacttttgccattatgtttgcttactacttaatctaatgtaaggtgtgtcaaacgatgaaaaaacaattaagctttcaagaaaaactgctgaagctgaccaaacagcagaaaaagaagaccaatcttcacgtttttatcgcgctgccaatcgtcttttgcctgatgttcgtctgcatcctgacagggaaggcggaaacgccgagtgtgaaaagaaatgccgatgaccttgtatcagcctcatttgtcggagatattatgatgggccggaatgtcgagaaagtgacaaagcataaaggcacggagagtgtcttccgttatgcaaagccattcttcgaatcatccgactatgtgtcagggaactttgaaaacccggttacatataaaaagaactacaaagaagcagaaaaaaatatccaccttcagtcaaacaaagatgccgtaaaagtattgaaggacatgaatttcacagttctcacggcagccaacaaccatgcgatggattacggccctcaaggaatgcgggatacggttgaagagttttcaaagcaaaatcttgaacttgtcggagcaggcctcacgctgaaggaagccgagcagaacatttcttatcaagatgtaaacggaatcaaaatcgcaacactgggtttcactgatgtttccggaaaaggttttgcagctaaacgaaatgcgccgggtgtgcttccggccgatccagagctgtttattccgatgatttctaaagccaaaaagaaagccgatcttgtcattgttcaaacacactggggacaggaatacgataatgatccgaatgacagacagcgccaattggcaagagcaatgtccgatgccggagcggatattatcgtgggacaccatccgcacgtgctggaaccgatcgaaatgtaccacggcaccgttattttctacagcctgggcaacttcgtattcgaccaggggtggacaagaacgagagacacggcgcttgttcaatatcatctccagaaaaacggcacgggacgctttgaagtcacgccgatgaacattcatgaagcaacgcctgcaccggttaaaaaaggcagcatcaatcataaaacgatcgtacgtgaactgacgaaagaatcgaatttcaagtggagcgtcaaggatggaaaattaacgtttgatgtggatcacagcgatatcttaaaaaagaaagcggagtgaaaaacaaatgaaaatcattaaagcgggatggccgtttgccgcgatcattatggtatttatgtttatgtctgcgtttaaatacaatgatcagctcacagatcaggaaaaacaaaaaattgacacggaaatgcaaaaaattcagcaagaggacacagcgggcgcaaaataagcgcatgattccgcttgccggcatattgtttgttccgaatccagtaaagaatgcccatatcgggcattctttttttgtgtgctctcctaaacatttgttaaaagttaccgatgtaaaaactactaaaaatgaggagagtgaatagaaaacatgctcacaagctggaggaagtacatccttgccggccttatgatttgtcttgtggcacctgcagtaacgagaacggaaattgccgaagcggattctcaagtttctgtcctgatcgtttcagacgcgcaaaaacttgtcggaaataaatatgtttacggaggcgaagagcctgaggacggttttgacccgtccggattgatgcattatcttttcagcaggcagaacatccatctgccgagaacggtcagtgatcaatggaaagtcggagccgccgtcaaagaaaatgaccttttaccgggagatcttgtgtttttcaaaaagtcagattcaacacaaaacgcggccgtccatgacggtctgtatatcggaaacggagagatgatacacagttctccgtcagaaggcgtaaccgtcacacgctttcaaaaaagcagttattggatgaatttatatcttggcgcaaagcggatgacaaaagatccggaactggctgatgatccgatcgttcaggaggcagcccgttacctcgacattccgtatgtattcggcggaagcacgcctgaggcgggattcgactgttcggggctggtccaatatgtttttgaaaacaagcttcacatttacctgccgagatctgcggaacagcagtggctggtcggtgagaaaatcaaactgagcgacataaagcccggggacgtgatttatttcagcgatacgtataaaaaaggaatttcccatgcgggcatttatgcgggagagggaaggttcatccaagcaagccgctccgaaaaagtcaccatttcttacttggcggaagattattggaaaaaacatttcacaggggtgcgccgattcagcaatttagccatttctaaagacaatcccgttgtgtccacagcggccgatcatatcggaatttcttatctgaaaggcggcgcttcaccggaaaccggctttgatacggcgggatttgttcaatacatctatcaaaaagcgaaaggaatcagcctgccgcgttatgccgacaagcagatgcaggcgggcgttccggtcgataaacaagatctgaagcccggcgatctggtcttctttaaagcggaaagcctgaatccggccatttatatcgggaacggacaagtgattcatgtcaccgtgtccgcaggtgttaccataacaaatatgaacacaagcgcttattggaaggacaaatatgcgggcggcatccggcttccgtaaaaaaagacgtcagagagtgtctctgacgtctttttcttttaccgtttcggcgctctgtatccggccgctatcgcatcctctacagaacagaacatttccgcgggatctgtcgtccggtcgtagtacgtacttcccggcgtgtgataaatgccgtaccggctgcctttaatgtcgcatccctgtgaggtgccggctgctttcgtttcggcatgtcctccggaggaaggggcgttgttttgcgccgtttccgcgttttcggatgtttttgtttctgctttctgccgctttaaagttttattttctgactgaagcgtttcagcggtcttttcgagcttcttttgtgaattttttaatttctcattgtcttgtttgagtgatttgtttgtttttttcagctcgcttatctcttggctgagtttgctgagtttttcttcattgccggcttcagcttcggatttctccttttcggctgcggcactgatgctttcatattttttctcaagcgcctggtgttccttcgtcaatttttgataagccgtatcaagggtgctgtatttctcctctgccttcacggccgaggcgtccggctctgcgagggatgcaccggtcagaagcaggataaatccgccgatgagaagaggccaaaacagcttttttgaaaaatgtttttctttttttgccgctttgcatatgagatgaaaaattccgtatccgactgcgcagagaaaagctaaaaatcctataatagcgattgcattcgacatcatgaaactccttttttagaaaacatgaaaaagccaggccgtgaaagacctgacttttaccttttattgcccattgtcgagaagccggttgatgaaatatgcgacgccgttttcatcgttgctttttgtaatataggtgcttttttctttcagttcatcaatcgcattgcccatagcgatgcggtttcccgccgcttcaaacatggagaaatcattcgggctgtcgccgatggcgtaaatatcctgtttttcaattccgtacagtgaggcaagctccgtcagagcacgtccctttccggaaccggcagggaggatttcgataatgtgttttccggaagatgtctgggataatttccgatgatgtgtaatttcttctttggcgtttctcagtttttccatatcaaaagagaaacaaagaagcttgtaaacatgttcgtctccgttaaaaatcgcctgtatatcctgtacgggtttaatgccgaattgtttgaactgcgtctttgcgccctcccataatgtctgaatatcttccttaggattggcgcttttcagaatgtccagttctgcctgcagtttggactcgccgtcaaacggggacagcagatgatcatctgtatagacctcaaagtaaatgtctttgtccgttaaataagcggcgatatccttcccggcctgctgatccattaagagccggctgacgaggcggtatcctttgtcatggactgtcccgccgtttgccgcaatgatcggaatatccaaatccttcaagagcgcttttacatcaaacgtggctctgcccgtgcagatggccacgagaatgcccgcttcatccgctctttgtaaagccgctctgttttccggagaaatcacactgtccgaattcagtaatgtgccgtctaagtcaatggctatcaatttcatatgtatggatgccctccttaaaaataaagctgcttcatgtagtatgttcagctttgtgcgaaatcagcagaaagccgtcagttaaaaggctataccttcatgtcctttttttcaacagaaaaacggcgggatttgctaatcccgccgtgacatcttacgcgtctaaatcattttttaatttcgtttttacttcttgaaggttttcctcattcagcttgaagtaataaatatttttgccgtactgaggagtgtaaatgtagctgtctgaacctgtcagctgcaaagaattcaccgatttcagcgatgtgataaacgggaacagaccgatggcgtcattaagagataagttcatttttaagtttttccctaagctgtcgacgatatcgtcataagatgggatcgagcttaacgatttagattttttaataatggcgctcagcacttccatctgtctttgtccgcgcatcagatcggtgtccgctttgcgtgttcttacataagccagtgcctgctcaccgtcaagcgtctggacgcccggcttcagcacgacttttccttttgtatcgactttaatacgatcggcaattttctggcttttcacatttaccgtaacgccgttcaactcattgacgacatcgcggaacgcgtcgaagttgctttcaaccacataatctaccggaatatcaaacatgttttctactgttttataagttaaattataaccgccgtaagcatgtgcgtgcgcgaatttgtcatagccgtgtcccgggatgttgacataggaatcccgcggaatgctgagcatcgtcgctgttttctttttccggttgaaggtgacgagcacgttggcgtcacttcttgcgtcatctactgattcacccttattgtcacgggcgtctattcctaaaagcaatacggtgaaagaatccttcttcgggtcaaattctttgatccgttttacggactggtcgccgcggtcaaggctgacgtgcgcttctttggtcgcattattcaatttcacaaatgcgtaggtgccgacggaaccggcgatcaccaataagaaagcggcgaataccagtacaaatttcacccattttctgaggcgtcttttcttttttctgcgttgagatcgttcttccatatcattacctctcgtttctattctttgtgaagcgtaccataattgttgactcggagcaactctgcaaatgagaaaattctaaatctttctctctatttcgacaacatctactgttatttttgcatcaggttcacattatattggacggcaggaagcgggaaatgtttcgtcgctttgtgaaaaataatcagtaaaataatggatattaacggtgcggaaggtttgaaacgatcggaaacaggcaaaagaagcagtagaacaattccgcgcggatacagcgttggatgaagggagtctatataacatgaaaagcatacactcgaataaatggctctattttttcggcgctctcgggggcgcgttatacggatatgataccggagtcatttccggagctattttatttatgaaaaaagaactgggactgaacgcctttacagaaggcctcgtcgtcagttcgttattggcgggggcgattctcggatcgggattcgccggcaaactgaccgaccggttcggcaggcggaaggccatcatgggagcggcgctgctgttttgtataggcggattaggagtcgcttttgccccgaatacagaggtgatggttcttttccggattattctcggactggctgtcggaacatcgacaacgatcgtcccgctctatttatcggagctggctccgaagcataaacggggggcgctttcttcgctgaatcagctgatgattacggtcggaatcctcgtttcttatatcgtgaactatatatttgccgatgcaggcgcttggcgctggatgcttggacttgcggttgtgccgtcagtcattctgctgatcggaatcttatttatgccggaaagcccgcgctggctgtttacgatcggcaaagaagagaaagcaagagaaatcctttcatcattgcggggaacgaagaatattgatgatgagattgatcagatgaaagaagcggaaaaggaaaacgaaggcggcttgaaagaattgtttgagccgtgggtgagacccgcgctgattgccggcctcggacttgcctttttgcagcaattcatcgggacaaatacaattatttattacgcaccgaaaacatttaccagtgtcgggttcggcaattccgcgtctatattgggaacggtcggaatcggcgccgtcaatgtcatcatgacgcttgcggctattaaagtcattgataagatcggccggaagccgctgctgctggccggaaatgcgggaatggtcatcagtctgctcgtattggccgcggtcaatcttttctttgaacattcagcagccgcatcatggacaacggtgatttgtttaggcctgtttatcattgtgtttgcggtcagctgggggcctgccgtgtgggtcatgcttcctgaattattcccgctgcatgtccggggtatcgggacgggtgtctccactttgatgctgcatgccggaacattgattgtctcattaacctatccgatgctaatggaagcagtcggcatcagctatttatttctcatttatgccgctatcggaataatggcattcctgttcgtccggtttaaagtgaccgagacgaaggggaaaagccttgaagaaattgagcaggatctgaaaagccgtaacggaggctcgggatcagaatcaaatcggcggacagttcatccgtaatattcagttttaggggggcggttattcaccggcccctcaaaacggatgcgtgcgggcgcccgcacggtcacataaatgacggggatatgtcatacgttgtataaagtcacgataaaggcggggatgccggtgaaaacgagtattattatccttacatataatgaacttgagctgacgaaaaaatgtctggccagcattgaacgatacaccgacaaagataagattgaactgattatagttgacaacggttcctcagacggaacgagagaatacatatcaaatctgcctgacgtcaaagtcatccttaatgaaaaaaacctcgggttcgccaaggggtgcaaccagggaatcgaagcggcagggggagaaaatctgctgtttctgaacaacgatacgatggtcacgaaaaattggctcacctccatgctgagggtgctgtatcaatctgaaaaaaccggtatggtcgggcccgtcagcaactatgtcagcggcgcgcaaatgatccatgacgcgtatcaatcgcttgatgagctggagtcattcgcggaggcgtattgtgcacgggaaaagcatcaaacaaagcgggtgctgcgccttgtcggcttctgtcttctggtgaaaaaaagcgtcattgaagacatcggcccgtttgatgagcaattcggatacggttcttttgaagatgatgacctatgtctgcgcgccctgcaaaaaggatacagcctgcacatcgctctcgatgcctttgtgcatcaccacgggcatgcgacgtttacggctaatcaggatatcaatatcaatcagttatattcggagaaccgccagcgttttacggaaaaatggggcactgattttacgtactttactcatccgagaccggaaattgcggagctcgttccccgggaggcgaaacggatacttgatgtcggctgcggtgcgggagctacggggctggaacttcaaaacagacagccttgcgaactgtacggaatagaactgcacccgctggcggcgcaagcggcaaaaggacattatgaagcggtgctgcaggaagatgtcgaaaaagtgaagctgccttatccggaaggcttttttgattgcatcattttcgcggacatccttgagcacttaaaagacccgtggcgcgtcattgaaacgtactcatcctatttgtcgcctgccggatcaatcgtttgcagcattccgaatatttcccacgccgaagcgctgttcccgcttctgctcggggactggacatacagagacgccgggattctcgaccgcacccacttgcggttttttacgccgcagacggtgcgcacgctctttccggaagagacatttgacgtgaaaaagcagtcctatacgtatgttcacgtggatgagcgggtgcagctgtttttacaggaaatcacacgaatggcgcaatcgatgcaatttccggtgacacagctgcccgaacaaagccggatttatcagattctccttcgtgtcgaaaaaacacgctgaaggctaccgccccatcgttccgaagttggtaatctgaatggaaacatcatagtcaaaggccgcttcggagaaggtttcatcccagtgatgcttcactttcttccaatagtcgggatattgaatgcggactctgtcagaaaagaagacagggtccgtttcatattgattctgcagcttatcgatgacttctttcatatcgcttttcagttttttttcgaaaaccttttccagcccgtttaaatagtgctgatcgaatgaatcttctccggcatattgatcctctgacaaaagtccttttgttttcaccgctacgtgaaacgacagcttcccgtttttcagcaggggggtgatggaggatgttgattttttgatctcgaaggtaattgggtgccctcctttatccaaagcgggcagcacgccgccctgtatcgtccccgtcagccaattcaggctttgtacttcgtatgatgacagaaagcctgccaatctgttttgttttccgtttttgataatggccgctccgtcatacaccgtttttcctttttgattgctgacggcctgaatgagaaaactgagtttattatggcagtaaatcgaagctctcccgattcggagcggttttaaaatcttcccgttgtagccgccgttgttcgtaaggtcgatcagcttttccgcgggcatgggctgctgctgattcggcgtcggctctgtcagaatatcggccgctttgcctcttgccgcgaagagatagctgctccgccttaattcatcatcacggataaaatggttcatcatctgcagtatattttggtcggccagcaatttgtcgctgaatatcagcacttttaaatgatcgctgtaaacgggcggatcttttaaagcgacttcactgacggcttcaagaatggtatccccccgcgacgtcacattgacaaacacgggccggccggaagcctggctgttttcactttggggcagcaggttttgataggttaatttatatcggcggtcactcgtctcgtctatcgccagcccccgggcgaaagatagcttttcgacttccttcgcatcccagcaccctgaaagcgtcatcagtatgaaaagcgccgccgcccattttacgaaatgtgtcatgacgtctgtttcctcccggctatttttttcatccagctgacaaaccagatgagaaaaggaatcataatgacggcaaaaaacgcatatccgagaatattcgcgaatgcaaacacactgttgatatcatcagggtacattgaaaggccgaatgtcactgccaataagccccccagcagccaggcattgtttttatttttcagtctgaaaatggtgtttaacccgagatgcgctcctttaaaagaaccgagcatacaggtgaactgctggcatgtccacgtaattaaaagaaagatatcaaacctttcgatgaaaataccgcggatttccaaggcgtgaatcagggaaatggtcggatatgtcaccgttttggcttcagcgatcgacatacagccgattacgacaagcagcgtaaagctgtaaaataagcctgcgcatgcgatgccgaagacggcagcctttttcgcctgcttcggatttttcataaacggcaccagataaagaatcacctcaagtcctgaaaaatacagaagggtacgcggaaacagctcaaaaaagcttttgtagcctccttccatgaccgggcggatgaaatccagtttaaacagtctcaggctgaatatgagcagcgtaatcagaatgacgatcgcaatcggaaagagataagcatagagttttgaaatgggatacaccccgccggtcacatggtagatgccgaccgccagaaagatgaatatgacgacacccatcggcgtatttttcagtaaaaagtaattgatgacctcaccgagaaaacgggcttgaaaacagacggtgacgacaaaataacagctgatgaataaattaagaagagaaccgatggcgcgtcccataatgctttgattcagctcataaatggtttccccgctgtttttctgcaaaaatggcataaagagcaggacgatgccgataaacacgagactctgcacaagaataatgatccatccgctcggactgtccgctgctgcggcggagcgcggcagtgttaacacgcccgctccgatcattgttccgcttaccatgagaagtgtctgcataaacgacagcttgtcttccggttttttcatggtgatcacctttgcttgattttatctttcgtctcttttctggtcggccgttttttcaaaagaggcgtcggcagtctgacgatcgtatcttttaagtcctgtcccggctgcgccatgatcggaataagatagtcctggccgaagcttttcaggcgcatcagatggccgacgacaagcagataacacatgatcagtccgtataaacctaatatcgccgacaaaatcatcgaaaaaatacggatgagtctcagcggaaaattgaacgcataggagggcgccgtaaaagaagccaatgccgtaacggatacgataatgaccatcatcgcgctgacgatgttcgcctgaacggcggcctgcccgatcaccacgcccccgatcaggccgatcgtctgtccgatcggcttcggcagcctgagtccggcttctctgatcatctcaatcgtaaaaatcataataaacgcttcaacaaaagggggaaacggaacattcaatctgcttccggcaatcgtcaccgccattctcgtcggcaaaagccccgtgtgaaacgtaacgagcgatatgtaaaggccgggtaaataaatcgtgattaaaatgcatgtataccgaagcagcctgagaaagttaaccggaacccaccgctgattataatcgtcaggtgagtggataaattcatcaatggtagccggcaccaaaagggtaaaaggcgttccgtctacaagaatggagacccttccttccaaaagagcgcccataacccggtcgggccgttcggtcgtcaagacggtcgggaaaatggaatacgtgttatcttcaataagctgctcgatcgttcctgattccggaatgtcatcaatggtgatcgaatccagtcttttcatcacttcttttacaacatcatcaggcgcaatatcccgaatgtaggcaacggcgatccgcttttttgtccgttcgccgagtgtgatctctttgatctggaggttgggatcaccggactgctcgcgcaaaagcgccgtattcgttcggagcttttcgacaaaacctatcctaggtccccgttcaagcacttctgaagccggttcttcaatatcacgcattttaaatgtttccgtttcaaacgaaagggcttcctcccatccctccgccagcaaaaccgatttgccggaaaaaatgtctgcctccgcgtccttaagtgaagaaagccgggtgtgacgatagccgaaagagatggatgacggcggtatttcagccggttcctcttgatgcagggcggccgcctgcacgggcgaaataatatattccgcaagcaattgattgtcggtcagtccgtctatatatataaggcaggcgtcacatttgccgtttccgtacgtaaacgaataaaacatcatgtcatcgctttggccgatccgttttttcagcgcttcaaggtttttgccgagctccgcatgtatcgtcataatgttcccccctttccatcagttattttaatttgcgacaaacaaggcattttattctggaataggaaatgactgagcattccgccccatccgaatggtataatgagcaggtcagccattttatacatattgtttttaaccgcggctccctccgtgttttaaaaaagacacagggggaatgggatatgagccgctttttaaggggaggggaacgaacatgacgcaagagccgatttttctacagcctgtatgtaaagaaaaaatatggggcggcacgttattacgcgaacgattcggatatgacataccttcagaaacaaccggcgaatgctgggcgatatcagcccatccgcacggaatgagcacggtcaaaagcggtccgtatcaagggaaaaccttgatggacctgtgggatcagcatagagagttattcggcggaacggaaggggaccggtttccgctgctgactaaaatactggacgccaaacatcatctgtccgttaaagtccatcctgacgattatgacgccgaggagcatggacagggcgaaacggggaaatctgagtgctggtacattattgactgtaaagaaaatgcggaaatcatatatggtcatacggcccgttcgaaagcggaacttgtcaccatgattaacagcggtgactgggaaggcctgctgcgccgcgtgaagatcaaacccggcgatttttattatgtgccgagcggaaccatccatgccatttgcgccggagcgctcgtgctggaaatacagcagaattcagacgccgcctaccggatatatgattacgggcgtacagatcaaaacggcggtgcgcgtgagctgcatatccgcgatgccgtcaacgccgccaccgttcctcatgtggacggatttttggatgaatcaactgaaacgagaaaaggcatcaccattaaaacctttgtgcagggagaatatttttctgtatacaaatgggatatcagcgggacggcggaaatgacccaggacgctccgtttatgttatgcagcgtcacagaaggaagcggctccatcatctttgaaggcaagtccgccaagcttgaaaaaggcgcgcatttcatactgccggatcagatgcctgactttacgataaacggagattgcacgatcatcgtttctcatatataaaaccaaacttaatcccagctctgggattaagttttttttatttggataattggatgatttctctctgtaaaaatgaagaaagcgggccgataaataaactagtttgatagaaaccaattgaatcagaaagaggagaaggaatgaaaaagagattcgttgcacctatgttattgtccgccgttttccttgtctttagcaccgttacacagcacgccgaggccgcatacagcgactactccgtttacgagctggaaacgaagcagcaatttgcttctgagaacgaggcgcttcaagcggcagcgaaattgaaaaaggatacggggtggcaggctgacgcaaagaaagccggaaatgcgccgctcacttatcaaatctcagcttcaggcttacacgatgaaacggatgcgaaaaccgtgctgaaagattttacgaagcagacgggcgtggccggcacttacagcgcaagcggaagcaaacagccgtacgtgaccgtcacatcaggcgttctatcagacgagcggcagacgaaaaatcttcttgccgaactgacgaaaaaaacgggcgtgaccggcgccgtcaagccggcggggacaaaacagccgtataagcaggtcgtgacttctgagatggcggccgatgcggatgcaaaagcgctctcgcaagcgttgacgaagcagacgggcgtgaaagcgtcataccgtcagatcaaacgggaaacagcccggtttcagatccaatcgggaacaatctccggcgatcaaaaagccgctcaaattcaaactgattttcaaaaggaaacaggattgcagtcgtcgctgaaagtcacggcaaaggccagtccgaatatcaccgtgacagcctctgacattttaaatgcaaataatgcggcaggtttagcgaaacagctgcagcagaaaacaggcgtcaaagggaacgttcaaaagtatgcccaaagcaaaacagcaaccgtgtataacgtgcagtcaggatattttaacggagtaagcgccgtacaaaatgctatcacccaaatcaagaagaatacgggtgtcagcggaagctatcaaaaagccggcaagaagaataattacacggtcgcgatgagcggactgacggctaaacagctgcaaagcgtgcaagctttctttaaaaagaaaaaatggcattgcgacgcatcgcctgtcaaaaagacagcatcagtgtccgtttaccggatcacggcagggcagcttaccgctgcaaaggcggatcaaacggaggcgtttttccgccagcagcatgtaaagacggcaagaacagcggcgggaaaaacagcagaaaacgaatatcagctgctttctcagcagacggcagaccagtcgaagataaaaaaaggattgaatctgctggcgggatataaactgactgccatttcaaaaacgatatccaagcagacggacacaacgtaccaagtcacaaccgaatcactgcttgatacggcaaagatcaatcaatcgctggattttttcaaagggaaaaaagtatccgcctccgcacagaaaacaggtgaagcggcgtatacacaattcagaattgaaacggcaccgctgcttaagaaggaagacattgaccgcgtgactgcttttttcaagcaaaacaaagcggccggcactgtgaaggagacggggaaaaccggctctgcacaatacgtcatcaaaaccgaaaaattcagcagtaaaaccgttttaaataaaagcatgagctttttcagcgccaaacaattacaggccggctatacgagtgaaagccatccggtttatgaactccgcattcgcaatcaattcacgggagcgcagtcagcggacgccgcctcccaaaagctgaaaaagctgtacggatggacgatggctattctgaaaataaaaaacggaccgcaaatcatgaacaccaattacaacatctcgctggcagatatggtcaaaaaacaaatgacagtcagcccgcagactgatgccgcggcttatgcatcgcttacgtacatcaatacggcctccggaacggtcacagccgacgtcctgaacgtccggtcaaccccggaagtcagctcaggcaatattatcgggcagttgaaaaaaggcgataaagtcagcatcacaggccagacaaacggctgggccaaactcagcatgggctggagaaacgccagcagtgacgaagtcgggcagtacgtcaatccggctcacttcgcacaagacagcaagtattactttcaatttctgaagctctctcagacagccggactgaacgcatcggaactgaatcaaaaagtgctggtcaataaaggaatactgacagggaaaggccaggcctttattacagccgccggcaaatacagcattaatgaagtgtatttgatttcgcatgctttgcttgaaacgggcaatggcacgtcagagcttgcgaacggcattatgtataatggtaaaaaggtttacaacatgtacggcatcggggcttatgacagcaacccgaattactacggcgcacaatacgcgtataagcaaggctggtttactccggaagccgcgattatcggcggagcccaatttatcggtgcgtcttatattcacaatccttcatacgagcaggatacgctgtataaaatgagatggtctccagccgcggctcatcagtatgcgacagacatcggctgggcgtataagcaggtaaaccgcatgtacagcttatactcactgctggatgactatacgctttactatgatgttcccgtgtatatgaaagtataaaaaaagggctgaagtgtatgcttcagccctttcttcatgcaaaaaacacccgcctcagattcaggcaggtgcttcagcacaatttttcatttttgtttccgcaaatttcaataacgcttcactcgaattcccatctgaatacatattccatttgtccgagaaccgcttcatttcttctgcatcaaatggctttttcgtcatttcctccaaaagagcttcactgtcatgacaagcctttccgggaatgacggaagtataattgtcgattaaaccgcgttttcgatcatattcctccagatcatacgtgaaaaagaaaatcggtttatttaagagcgcgaattcaaaaggcacggaagagtaatccgtaattaaaatatcagccgctttcaagagatcatgaagacgcatgtcagacacgttcttgatcaattcgctttcaaacgaagccgaaatatgatgcaaaacggcaggatgaagctttacaagcagcatatactctccgtttaacgcgtttgtgagctgttcttcggtgaatggcagccgaaaggactgcatatcataatccctgaatgtcggtgcgtacaggatgatttttttcggccatttgtgcttcggttcgggcttgtgttcttcataatagacgtcagtcagggggacacccgtttttaacagctggccgtcccgtatgccgaacgactttttaaaaacgtcagccatcgcgtctgaaccgacggtgacaaagtcaaacgagcggtacacttttttaaaacggctgatgtctgatgccggacggttttgattcgtcacatcctcaaggccgaactttttcaaagagccgttcgcatgccacacttgaatacatgtcgtttgcggccggcggtttaagacgcttgtcatgaggaaatagttatccgttatcaccgctttgctcttaaaaaggatcaaaaccgccttcaaaagatgcagcggatgtttttcgttcagataaaaagagccgagtccttccagctcttttttcagactgacggcgtgtctcgtatacaaaaccgtcacttcataagaaagcgattcagcgtgcgctttgtaagaacggatgagagcctgtgcattctcttcaaaagataccagcagggtcagatggttcttgggctttacaggcttgaacaaaacgcccagaacagacagatatatagaataaaaagcggcgaataaagatcgcaagttcatagattaccaatctcttttgctgttttatttgtttaaagctgtttcgtttgatcttctgcctgctcggaatacaggcttttatttgatttattatttctcaaaacggtaaaagcatacttcggaatgttcagcatccttttccatctccacggattcgtcaccagtctgtacagccattccagattcgttttgatcatccattcaggggcgcgtttcaccgttccgctgaacacatcaaagcttccgcccaaaccgatcgatacagcctgagggaaaagatgtttgtattcataaataaattgttcctgatggggatatcctaaggcgacaaacacgagatcgggtttcgcccgggaaatctgtttggcgacgaagcgtttatccgcttcataaccgttgctggctccgacaacctcaatattcggatactctttgccgatccggttcaaaacggcgtcaagcacgtcttgcttagctccgtataaaaatatttttttagactgccggtttgcgagaccgagcagcgacagaaatacatcgaatcccgcaattcttgatttcagcgggtgctgcgtcaaacgtgacattaacacgacgccgataccatccggcaggacgaaatccgcggaagaaatgacttgatgataacctttgtctttcgccgcagcgtatccgatctcagggttgaccgtcgcaatgacggctccttgcttttgtgcgatataataagtgtctaaatatgaaataaactcctgtaaatttccattaacataagaaaggttgtgcaccatttcagtctgcatctgccgtcctcctttttgtacgggattttctttcattttttcgtgacttaagctaagctttattttaacataataccttcagataaacttaacaatagttttacaaaaatataaataagataacaatttctttaatcaaccgcgcaaaaaccctgctaaactcctattgcaataacatttgttaataagtggaatttaacttcgttttacattagcttaaccttttcagggctatgtgatataatgaggttccatgagtacgaaattggcactttagtgattaaggatacagctgcgcagcatttcagggcagttgcttgttatacgtatgatgatagaaaggagcttttgtttcatgaagaaggtcattacttacggaacgtttgatttactgcattggggtcatattaaactgcttgagcgcgcaaagcagcttggagattacctagttgttgccatctcaacagacgagttcaacctgcaaaaacaaaaaaaggcctaccacagctatgaacacagaaagctgattctggaaacgatccgttatgtcgacgaagtcattccggaaaacagctgggatcaaaaagtacgtgacgtagcggatcacaacatcgacgtgttcgtaatgggagacgattgggaaggcaaattcgatttccttaaagatcaatgcgaagtcatctatctccctagaaccgaaggcatttccaccacacagattaaaaaagaaattgccggggtgtaattgaaacattcggatatacagatgataaagaagtactccctccggatagggagtacttcttgtaatataaggttattttcgctatatttgttatgcgcttttgaaaaaaagctagacaataagaggagaatttaaagatgaatcttagtaacttttttaagttgaataaaaaagagtccaagccgtccatagaagaacgcgaatataccattttaaacaaagaagcattggcggaagagaagaaggtagcggtagtcgttcctgtttataatgcagaagaatatgtaaggaaaacagttgattctgtgatccttcaaaacatcggctttcagcatatttctttaattctggtagatgattgctctaccgatgattccagaaacatcctgactgagtacgccgaattgtatgaaaatattacagttgtctttttgaaagacaacacgggaactccggcttatccgagaaacttgggaattgagctggcaaatgcgaagtacattacatttttggatgcggatgattggtttgcgccgaacggggttaaaatcttattcgacatgcttgaaagagatcatgtaaattatgcggtcggaaaaacgatcgaaatgcaggtgaacggtcaaaaaacgatcgggaaacatgagtcttcgctgaacagagcgaaggtatcgcctttttcaatccggcatattttctatcatctgggcccgcgggcaagaatgatgaacttacaatttctaaaagataacgatatcagatatccggaaatgaaatttgctgaagataagcaattttttatggatgttcttttggcgtgcggagatatttcaacgtcaaccgaaccggtctattatctgaacagaatggacaataatgagtcgctgacaaagcagaccaatataatggaaaaaaccgacacgaacatagccgtaatgaagtatattctgaacaaaaaattagatactgaaaaagagaagatggcgatgaaccgcctgattgaattcgattccattacgcggcttttcgatcggatgcacttcctgaaaagcgaaaacaaagaagcctactacaataaattcaatgaaattctgaatgtgttaaagaagacgaaatacgatatttccgagacattttttcatccgattcataaaacagcctaccgtctgctgactcaaaaacggtatgatgaggtcgaaaagctgttccgctggtccaaaaaagagcccgataaaaacatcgtgacgaaagacggactggcttatttagaaagcccgctgacggatgaagaaaataaactggtcgaacttcgcatgcacggagaaacggaaagcgcggtgttcgccgatcataaattcaccgttacgttccgcttgttcggacaggacagaaataatgcccaatatattcagtttcagcacagagataacatgaaagtacaccaccagtttccggttcagtcactgggagacgggcggtacgtccttgaaatcccgttaagtgacattgaaaaagtcggacttggcggttatattatgtatgtcatttataacgattatgaacgtgtcatgttaaacagagaagacggtgaaaaggtgacggcagaagcgaacggactgcaatatcaattctaccggacggtgaaggagaacctttcactgaaagtaacaaaatgatgattgtgattggatatgtttaattgaaacagaggagtagacttattttatgggtatagaaaatcctgtcagatacaagttaaaacatcttaacataaaggaagagacattcagcattacgatatcctgtgaaaatgtcactgcaggggaagagccttctcttcagattataaatcgtaaaacaaaagcggaactttccgtccctctgaaacggttggccggagagggcggagagtaccatgctgtcatgagcacggatctgctttctgaccatacggacggcaaaggatgtctggatttctatgtctcctttatcaatgatgacagtgatatcagtaaaaaacggttaaaatccagccttgaacctattgaactgtcttcttataaagatgaggctcatcatatgtactttttcccttacacgacgaagaaagggaatttctccttaaagctgctgcagaaaaagttcgtcacgcggattgatgaaatggagctcgaatctgacggcagcttacatctgaaaggttttgcattccggctgaatgcggcagaaaccttaaagataaaagaaaaaaacctgattctgaaaatgaaaaaaggaaaagaagaggagcctctcattctgaagtatccgcttcacgacgtgccgagacacgaccttgatgaatatgttcaggacacaacgatgcttgacacgataggctttgatacaaaaattgatttgaatgctgtttataaagaattgaatcagcagctcatctttcaattccatattcaattcatttttgaagatgccgggacaggtgaagaggttatcaccaacagcaaaccgttaaaggttctgaaatctgaacatgtaaaccctaaccaattcacggttctgaaaacggaaaaagggcctgccagatttcacgttttcacgaaaaagaaaacgaaaaatctccacctgagaatgaacgattacagcttcagcacccgcgtggagtattttgtgaaaggtaagctgaaacggggcgcttcctttgtacgcaagagaaagaataagctgaaaaagttcattgagaaaagaatacagaacacttacaaagcaggattcagatttgcaggaaaactgcctgtcaaacagaaacttgtcatgtttgaaagctttgccggaaaacagtacagctgcaacccgcgggcgatttatgaatacatgagcaaagagatgccggaataccgtctctgctggagtgtaaaccccgcttactcacagacatttaaagataaagggattccttatatcgaacgcttcacgttcaaatggctgtttgccatggcaagagccgagtactgggttgtcaacagccgtatgccgctgtggattccgaaacctgagcatacgacatatgtccagacatggcacggcacgcctttaaagcgccttgccgtagatatggatgaagtgcatatgcccggaacaaacactgaaaaatacaagcgcaactttacgacagaggcttcaaagtgggattacctgatttcaccgaacgcatattcaaccgaaatattcgcccgggcgtttcagtttaataaaaccatgattgaatcgggatatccgcggaatgacttccttcagacggataacagcccttctgtcattaaagcgctgaaagaaaaaatgaatcttccgcaagataaaaaagtgattatctacgcaccgacatggcgggatgaccaattttataagaagggaaaatacaagtttgaccttgatttagaccttcaccaattgagagaagcgatcggcgaccgttatgtcattattttacggatgcattatctcgtggcggaaaactttgatctcggaccgtatgaaggatttgcgtatgatttctccagctacgaagatatccgtgagctgtatatggtctctgatttactcataacggactattcctctgtcttttttgactatgcgaatctgaaaagaccgatgctgttttatgtgcctgatatcgaaacgtaccgggataaactcagagggttttactttgactttgaaaaagaagcgcccggcccgcttgtcaaagaaacaggtgacgttatcaaatgggtcaatgaaacggaatcagatgattataagcttccggattcgttcgggcctttttacgagaagttctgttatttagaaaccggagaatcgtctgaaaaagccgtaaaagtgattttcggggacaagtaaataagtgcaaaaaagcataatttaaccatgttaattatgcttttttgcttaagtgacggcatgttgcgctcatgggactcaggcttgttatgaagtgaaaaatacatcgtaatctgttacaattatgagcggtgcttttgtaagtcaaagctattacctaaaacttacgactaaggaagattagaatgaatgcattggtaaaaattctgaaagagcaattcaactcatttccgctgattatgcggcttgcagtgtacgaaacgaaatcaaagtatcaagtgaactatttgggtatattgtggcagtttctcaaccctatgattcaaatgctggcttactggttcgtatttggcctcgggattcgcggcggacatgatatggtgcttggaaatggagacagcgtaccgttcatcgtctggatgctggccggcttaattccttggttctttatcagtccgacgatactggatgcatctaacagcgtttttaaacggataaatttagtgtcgaaaatgaactttccgatcagttcactgccttctgtagtgatagcatcgaatttattcagttactttgtgatgatggcgatttatattattgtgctgctgagcaacggactgtttccgacgcttcactggctgcaatatatttattacttgttttgcatgatcagttttatgtttgctttcggcctgtttaattcaaccatcagcgtattaatcagggactatcagtttttgcttcaagccgtcacaaggcttctcttttttcttctgccgattttctgggacattgcggagaaatttggaaacagacctgaagttttgaccatcttgaagttaaaccctcttttctatattatcgagggcttcagagacagctttatggaagggcagtggtttttccacgatgtgaaatacacgctgtatttctggttcgtcacactgctgctgttaacagtcggttcacttcttcatatgaaattcagagataagtttgttgactttctttaatatagtaaggagattatacgatgaaactaaaagtttcgttcagaaatgtttcaaaacagtattttctatataaaaaacagtctgacaaaattaaaggattgtttttcccaaacagaaatcaaaaaggttttttcgctgtccgaaatgtttcttttgacgtctatgaaggggaaacgatcggattcgtaggtatcaacggctcgggaaaatcaacgatgtccaatctgcttgcaaagatcattccgccgacaagcggtgagattgatatgaacgggcagccgtctttaatcgcgatttctgccggattaaacaatcaattaagcggcaaggacaacatccgtttaaagtgcttgatgatgggtctcaacaatcggcagatagacgagctttatgaaaaaatcgttgaattcgcggatatcggcgactttatagatcagcctgttaaaagctattcaagcggtatgaaatcccgtctcggttttgccatatcggcgcatatggaccctgacatccttattattgatgaggcgctctcagtaggggaccagactttctatcagaaatgtgtggaccgcattacggaatttaaagaacgcggcaaaacgatctttttcgtcagtcattccatcggacagattgagaaaatgtgtgaccgggtggcttggatgcattacggcgaaatgcgtatgttcgacgaaacgaaagccgttgtaaaagaatataaagcttttgtggattggttcaacaagctttcaaagaaagaaaaaaagaaatatcaaaacgagcagattgaaggcagaacgcgggcagccgaggaacagaaaatcactcaggcccagcaaaagaaagcgaagcctaaattcattgccaatacgatacagattacgctgcttgcattgctggctgtcggcgcaggcgcttcgatgttttcagacaagcctctgcgtgcgatcacatctttcggtgacgtcaaacagagcgatgccggcctttatgagtctgtgaataaacctgctttggtaaaagctgaaaaggcggacctttacactgaaaaagatataaaaggaaaagcctccgcaagtgtaagtttcggtacgaaggtgcagatagaagccgagaataaccaggcggctaaagtgaaattaaacgataaagagtactttatgaaaaagactgatctatataaagtgaacgctttaaaaaagacggatgttcagctgaatgatttcagcggcagtttatcaagccaaacagcagaagagtttctctcatatctcaataaaagccgggacgatgtgcagcgtaaattgaaaaatccagctgcgggacaaacggctgacggacggaacgtattaaaagcatccgatgcaaaaacggatgtagtgattgacaatgatacagtctccgaagtggtttttcatttatcgcgtcctgcagacatctcagctttaagtgaaaaaggcggcagcaaaatcaatcagaatttgctcatgcttaaaaaccaggaatatactttttctgtgaacaatgctgataagacactgacggtaacgtctaaaaagtaaagatcacataaaaaaagctgccggattcggcagctttttctattcgtcagcttcttctttttcaagaagatccttcatgaacggaattaatttatggcggatatcctgatcctgtaaggcaaattcaagcgtcgtctcgataaatcctagtttttcaccgacatcgtaacgttttccttcgaaatcataagcgaagacacgctgaatgtcattgagcttttggatggcgtccgttaattgaatttctccccctgcaccgacttcctgctgttcaaggtacatgaaaatttcaggagtgaaaacgtatcttcctaaaatagccaagttggaaggagctgtgcccggttcaggcttctctacaaaatttttgacctggtaacggcggccttcatttgttaacggatcgataattccgtagcggtgtgtgtcgctttcaggaacttgctgaacaccgatgatggaagacaatgttttttcgtattcatccatcagctgacgaagtcccggtttttcagcctggacaatatcatcgccgagaagaacggcgaaaggttcatcgccgatgaagttgcgtgcgcaccaaacggcatgaccgagtccttttggctctttttggcgaatatagtggatatccgcaatatttgacgattttttcactttttgaagcagttcgattttccctttttcttctaaattgcgttccagttcaggggcattgtcgaaatggtcttctattgctctttttccttttccggttacgataataatatcttcgatgccggattcgacagcttcttcgataatatactgaattgtcggcttatcaacgattggaagcatttctttaggcattgcttttgtggccggcaaaaaacgagtgcctaaacctgctgccggaataatggctttgcgtactttcttcactgaataacaccatccttgtttctgcaaaatctttttttcagaactataacctagtctttttccactttaccacaattgattaaaattcacaccttttaatccgctttcaaagagtcttgtaacggtttttgctttgtttgccattaagctttacaatattaagaaacggcataaatatgttaacatgaagggatatccgacatataaaacgaggtgcagacaaaccgttgaaaaaactaaaagtaatgaccgtattcggtacaagacctgaagcaattaaaatggctccgctcgtattagagcttgaaaaatatcaggaaattgattcgctggtgactgtaaccgcacagcacagacagatgctggatcaagtgcttgaagcattcagcatcacgcctgattttgatttgaatattatgaaagagcgtcaaacgctttcagaaattacatctcatgctttgctgaaactggacaagctgtttcaagaagtaaaaccagatatcgttttggtccacggagatacgacgacaacgttcgccggaagccttgccgccttttatcatcaaatcgccgtcggccatgtggaagccggtctgcgtacgcaaaataaatactctcctttccctgaagaaatcaaccggcagatgacgggcgtgatcgctgatgtgaattttgcgccgacaagccaggcagaacagaatctgcttgctgaaaataaaaagccggattctatatttatcacgggaaatacggcgatagacgcgcttcaaacgacagtgcgggaagactattctcatccgatttttgacaagctggaaggaagcaggatgattcttttgacagcgcacagacgtgaaaatttaggcaggccgatggaacagatgtttaaggccgtcagaagaatcgttgaagagtttgaggacgtacaagtcgtttatcccgttcatttgaatcccgcagttcgtgaggccgcagaagcccattttgctgattcggacagggtgcatttaatagaacctctggaggtcgtggatttccataacttcgctgcgaaagcaaatttcattttgaccgactcaggcggggttcaggaggaagcgccttctctcggaaagccggtcttggtgcttcgggacacaaccgagcgccccgaaggagtgaaagccgggacattgaagctggcgggtacagatgaagaaacggtgtatcagctgacaaaacagctcttaaccgatcaggccgagtatgaacggatgtcaaaggcgtcaaacccttatggtgacggatcggcctcaaaacggattgcggaagaactgctttatcggtacggctatagaaaaacccgtccgcagccttttacagaataaaaaaactctgcatcatatgcagagttttttattatttcaggctttcttttaattcttttttgactgaagcgaggcttgcttcatctaatttgtaataatagatattgttgattctcgttcccgttcccttcagttcatgctgagtgactttgctgcgggcatttttatagtcagtcataaccgtccacatatcatcgaatgacatgtttgttttcatattgttttcaatgaccttaaacatatctccgaatttcgtgacagacgagatgtttgcccccttagaaataatcccttcaatcacttggcgctgccgctgctgtctgccgaaatcccctcgggggtcttcttttctcatgcgggtgtaggcaagtgcttcttcgccgttcaggctgatgttccccgttccgaaagaatgcccgtcgtagttgaaggcgaacgtgctgttcaccgtaatcccgccgagtgtatccacggtatctttgaagctctccatgtttactttcacaaaataatctaccggcacgtcgagcaggtcctcgacggtatccgcggccatttgggttccgccgaaggcataggagtggttgattttatccatcgtacctttgccggagattttcgtatacgtatcgcgcgggatgctgaccatttccgttgtattcgttttaggattgacggtcatataaatcatcgtgtccgcgcgccctttgtcatttttccgctcatcgactcccatgattaaaacagaaatcggatccttctttccgagatctatatccgtgtcacgtttgtccgatttttttaagtcttcctgaatgcttgccaccgttgaagccgctttgtgccacaagtagtagacgtagcctcctgatgataaaactaacagcccgatgattgttacgattgtcagaagaacctttttcttctttctttttcgttcagctctcatttgtcatcaccttttctattaactttcatgatgcaatttactaatctttataaacccagtcatatttttacttataaccatgtaatagacgaaattcttaaaaaaaaggttacaaaaagaccttaaaattaccttaaaaaaaagttagtataagacgatacataaagatgaggtgaaaaaaatgaaaaaaactattgcagcttcgttcttaatactgcttttttctgttgtattggcagcgtgcggaacggcggaacaatcaaagaagggaagcggttcttcggagaaccaggctcaaaaagaaacggcatattatatcggtatggcggatacgcacacaattgaagtaaaagtggatgatcagcccgtcagctttgaattttctgatgacttctctgatgttctgaataaattcagcgaaaatgacaaagtcagcattacttatttcacaaatgataaaggccaaaaagagatcaaggaaatcgagaaagcaaaataatacaccatgatcagcaaaaggcgggataaaaattgaagaaaacaatatgggctgtctgtttttctgtgatattcagcctggctttattaccggaaagcacttttgcggccagttctgatatctcagtaaaactgacgaattatattggtaataaatcgactctgaatatcgaaccttcaggaacttataaactgacgggaagcgatgtgtcctccgttgtcagattgggaggcgcgtccaaatatgatacggctaacgccgcgacatctaagtattggaaaaacccgtccaacgtagtcgtcgtgaatacggacgcttattttgcggacacgctttccgtcattcctttagcgaataaactgaaagcgcctgttctgctgactgaagcgaaaaaactgagcagcagcacagaagcgcaaatcaagaaattcaatccggataatattttaatcatcggcgggacgaacagtatttcgtcagccgcggaaaagacattgaagaaatacggccgtacgaaacggatcagcggaaaaaacagatatgatctgtccaaaaatattgcggccgaaatgggcagctatgaccaggcggtcgtagtaacgggggatgtatatacggatgcgctggcaatcgcgccatatgccgcgcaaaacggctatccgattcttctgacgaaaaaagactcccttccgagctacaatctgcctaaaaaagtgatcatcatgggaggcacttcaagcgtcagcaaagatgtggagaatcaaattaaaaagaaggcctcggtcaccaaacgaattaccggatcaaacagatatcaaatatcagcaaacgcagtcacttcgcttggcatggatgcaagcaaaacggtggctgccaacgggactaaattagcggacatcgtagtcggatcaaatattgccgccgcaaatcacatgccgcttgtatacatcaaaaaaagcgaaacacccgccgacgaggccggcctttttaaaacgaaaggcacctattcttatacattaataggcagcgcgaattcaattgccgattcagttaaggctgcttacgcaaaagagttttatctcgtaaacggaaagacgtaccgtattgaaacgtccggcggcaaattaggcgttgcaggcattaacagcggaaaaacgtctttcaaggcggttcctgaaaaatattcaacagcaaacacaatcagcattgacgggaagccatatctggggaatatgagtttcactgctgaatccggcaaatatgtaagacctgttaatgaaaacattccttttgaggattatctgaaaggtgtcctgccgaatgaaatgccgggaagctggccgacagaagcgctgaaagcccaggctgttgccgcccgcacctactctatcggcaagatgggacaaacagtcgcggatacaacggcctttcaggtttacgggggatacagctggtatccaaacgccaccgcagccgttaacggaacaaaagggaaagtgctcacttattccggcagattgatagatgccacttactcatcaagcaatggcggttacatggaagccggcgatgaagtgtggggatcgaaagtgccgtatttagtagccaaaaaggacacaaaagatcccgaaatcagctggtctttaacattgcagaagcagcagctgccagcgggtctggatatgaaaaatcccgcatcctggtggtctaaaacaaacgaagcaaatgctgcgcagctcaacggaataaaaaattggctgatgaaaaataaagaaaccaatgcaagttccataaaaattgcaagtatctctgatctctcgctcaccggaaaaacaaaaggccagcgcgcggaagacgccgcggtgaaggtcacgtaccatgtgaatgacaagtcgaagggctatgtcatgaacaagactgcatctgttgaggtgaaagcgtctgaacttaggacgatgatcggagcttcatcttttaaaagcacatacgccagtgcgtccggtaattcttcgcaaatcacgatatcaggaaagggatacggtcacggcgtaggaatgagtcaatacggagcaaaagaaagagcggaggccggagagccgtatacttctattcttgcgttctattatcctaatacagcacttacaaactactaaacttctgtggaggagatcggattgaaattcatcataaaatgtctccccgtctttattctcggggtcattctatttgtcccttccgctttggctgacaacacggttaaaaggatcggcggaagcacccggtatgatacggctgtactggcggcaaaacaatcatggggtgaagcgaaaacggtaattatcaccggcggaacttcatatgccgatgcaattgccgctgcgccgcttgcatatcaaaaaaatgcgccgctgctgtttacaaataaagatcagctgtctgccggcacaaaaaagggattaattgatttaaaaacgaaaaatgtgattatcgtaggcggcacacctgccgtttcgaaaaataccgcaaatcaaattgctaaattaggcatcagtgtcaaacggttatcagggagcacgagatatgccacagccgcaaaagtggcgggtgaaatgacaagatcttctacagcccttgtggtcaacgggtttgttgatgcggatggaatggctgcgatttcttatgcgtccgctaaaaaatatccgattttattcactaatgattcaacgttaaatggttctgcgtccaatgcgatcaaaagcttagggattaaaaacacgattgtcatcggcgggacaagcagcatcagcagctcactttataataagctgccgaacccttcgagaatcagcggcaaaaaccgctataacctgtctgtgaatcttgcaaaaaagacaggcttaagcacaggctatacgtttgttaccaatggctttaaagaggcggataccatcgtcggaggcgtgctgagcgccaaacagggaagagttcacctgctgacgaatggagacagtctgtcaaaagacgtccggacgtatatcggaagtaaaaacatcaccagcttcaccgtcataggaagtgcttcatctttaagcaacaatgccgcgtcgcagcttaaaaatcccgttgtcggcaaaacggtctttattgatccgggacacggctatcaggattcaggtgcaaccggaaacggcttgcttgagaaaaatgtaaaccttgatatcgctacgcgtcttaacaatcaattatacggcgcgggcgcgcttactgtaatgtcaagaaagggcgacacctttgattcgcttgaggagagagtgaacaaaggggcgaaggcgaacgccgatattttcatcagcgtccatgcaaatgcgaatgataacagcagtgcaaacggtacggagacgtattatgataaaacctaccaatcggcaaacagtctgaggcttgcccaaaatattcagccgagaatggtttctgctctcggcacgcgtgaccgcagtgtgaaaactgccggattttacgtcattaagtattctaaaatgccgagtgtcttgttagaaaccggttttgtcacaagcccgattgatgccaatattctaaaacaatcaacgaaaaaggacagactcgcggcggggatcacccaaggcgtttcctcctatttcagataatttttttcatggaaacagaccggttcataccggtctgtttttttattttttcattatgctttgtctcaaatatggatatgaatagatttacaataaaaaaacaataatcgaaacattctaataaacattaacgtttcctttacttccaattaacatccatctgctaaactcacggcataggtcatcaaacatcccaacaaatcgtgaggtgtgtgtcagtgggagcagagaaaagcatgaatgtaaataataactatgcagtgcggcaggggacttccgctgccgttacggaaagaacggcccgttatttggcttttaagcgattcatggacattgtgtttgcgcttgcggggcttttggcggcgctcccggtgatgggcctgttctccatactgattcgtttggagtcgcccggcccggctttttacaagcaggagcgggtaggcaaagacgggaagccgttttatttgtataagctccgctctatgaaaatagatgctgaaaaatcgggggcggtctgggcgctgaaaaaggatccccgcgtgacaaaggtcggcgcttttatcagaaggacccgtattgatgagctgccgcagctggtaaatgtgcttcggggagaaatgagcctgatcggcccgcgtcccgagcgtcccgtgtttacggaacagtttcaggctgagattccggggtttacggagcggctggccgttaagccgggattaagcggctgggcgcaggtcaacgggggatatgacatgacaccgagggaaaaactgatgtttgacttatattatatccgcaacctgaccttttcattggaactgaagattatgctcaaaacgtgcaaagtgatctggaccggtgacggggcgcgataaaaattctggtcagcagacaaaaaagtagggaaaacgatgcctagtattacaaatcaaattttgagcggcgccaaatggacaagtatttcgacagcgtgtattacggtcattcaaatcgtccaattcgccctgctcgggcgggtcatgtcactggctgaattcggccttgtcggcatgatcacaacggtagtggtgtttgcccaaattgcgcttgatatgggttttggcgccgcgctcattcaaaaagatcatgtgactgataaacagatgtcttccttgtactggctgaatatcataacggggcttgcgctgtttgcgctgctgttcttcagcagtccgctcattgccgatttttatcggcgggaggagcttgtctatttaatccgcgtgctggccgtcatgtttttaatcgcgccgatcggtcagcaatatcaatatatgctgcaaaaagcgctggcatttaacacgctaagcaagattgaaatcttttcaaatgtgctgtccttcgtttacttggcggctgcggttttttatacggacccgattctcgcctatgtgatttcccaggtgctgctgcaatcgtcaaaaggtattctgtactgggtgtcctgcagaaaaacatggagaccggtgttcgtttttgatctgaagggaatgaaaggcttcttttctttcggagcctttcagctgtcttcccggcttgtgaaccggctcggggcgaatattgatatgattctgatcggcagttttatcggcgccgaggcgctcggcatttacaatctggcctaccagattgtcacgcttccggtattaaaaatcaatccgatcattacgagagtcgcgtttcccgtctttgcgaaaaacaagcatgaaaacagcgtgatcagagaaggttttctcaatatgaccaaaatactcgcgctgatatcctttccgcttttgctcggtttggtttcagtatcggatgcattcgtggcttcggttttcggagaaaaatggctggcggctgtcccggttttaaacgttctcgccatcgtcgggattttaagggttctgatgaatccgaacggatctgtgctgctggcaaaagggcgggccgatctggcattttattgggacgccggggtgatgctgctgtatggtgcatctttgtacgccgccgtgctgtccggaaatctcttgacggtagcctggacgtacgctttcatcagcatcctgaatttcctgatcgggcgctggctgctggcatatgtcattaagctgcggctgtcggcttacttcaaagccgtggccaaaccgtttctgcttacggcggcaatgggtgtcatcgcctttacagccagcttcgggacggagcggatcagccttgatgtcaagctgcggctggcgatctccgtatcctgcggagcgttgtgttatttgttcctgttaggaaaagcttatccgcatatgaaaagtaaattaagaaaaggacgtttgctatgaaggtattgtggatgacaagtgtatatccgagcagtgagaagccgggagaaggcgtttttcatgagacgcaggcccaagaactgagaaagcttggcgcggagatgactgtcatttgtccccggccgaaactcgccgcgccattccgggtgctgaaaaagacgtatcggcaaaaggatataaggccggcgcatgaatggcggaaaggcgtgtccgtccaccggccgttttatcaggcggttcccgggcagctgaaatgggcgcagccgcataaaagaatggcgtcatcggttctttccgaaattaaaaatcatggcctgaagcccgatctgattcacgcgcatttcgccatgccgtcaggcggagcggccgccattgtgtcaaaggctttaggcatcccgtatgtgctgaccttgcatggcagtgatgtcaatgtctatccgcattacagcaaaagcgctcatcgcgcatttacatttgcggtgcgggaagcagccgatatttacgctgtgagcggcagtctgcgggaacaaatgaaaaagctcatcgaagcggagtgcagcgtgcttccgatcggcatcacgcttgacgccttccgaaaaaggaacgagacgaaagaagccgtcagaaaacggctcggccttcctccggataaaaaactgatcgtgttcatcggcaggcttgtcaaagagaaaggtgttttcgacttatcaaaagccgttcagtcattggatgaaagatatgaagctgtctttgtcggtgacggtccagccgcatcttcattgcgtgaagccgctcatatcgtcacggggcaagtgccgaacgacaaggtacaggactatctgctggcctcggatgtaatggcgctgccgtcctacagcgaaggcatgccgactgtggtcattgaggcgctcgctctgaaggtgccggtgatctgtaccgatgtcggaggattggcttctttatttgggaaatatagaggtttgctgatcaagccgggttcacctggcacgctggcagaatccattctgcaatatgacgaaggagaggcttggacgccgcaaacagccgaggaactttatcaaaccgtccgcacgtattttgacgcaagccaaaacgcgaaagcgctgaaagagaaataccggtccgtcatgaaccggtccgggcaagaggagaacctttcgaaagagggatgaagctgtgaaaaaaatcgctgtattaggaacagggtatgtaggtcttgtatctggaacttgttttgcggaaatcggccatcatgtgacttgctgtgacatcaatgaagcgaaaatcagaagcttgcaaaacggagtcatcccgatatatgaaccggggcttgaggaattagccgaaaaaaatgtcagtgacgggcggttatcctttacggccgatattgagccggctgtgaaagccgctgatatcatctatatcgccgtcggtacgccgatgtcaaagacgggtgaagccgatctgacctacattaaggcagcggcgcaaacaatcggagaacagctgaacggatacaaaatcattgtcaccaaaagcactgttccggtcgggacgggaaagctcgtttaccaaatcgtcagcgaagcgtcaaagggaacatatccgtttgatgtcgcgtcaaatcctgaattcctccgcgaaggttcggcggtgcgggatacgatgcagatggagcgggcggttatcggcgccacaagcgaacatgccgcttcggtcattgaagagcttcataagccgttccgtacgaagatcgtaaagaccaatcttgaaagcgcggaaatgattaagtatgccgcaaatgcttttttagccgccaaaatatcttttattaacgatatcgccaatatttgcgaacgtgtcggggcggacatttctcacgtgtcagaaggcgtcggtcttgacagccggatcgggaataaatttctgcaggcgggcatcggattcggcggatcctgctttccgaaggatacaatggctttattgcatatcgcaaacgccgccggctatccgtttgaaatgatggaagccgtcattgaaaccaatcagaagcaaagggtccgtattacggaaaaattgaaccgcgccatcggtcccttaaaagggaaaaccgtggccgtactggggctggcctttaaaccgcatacaaatgacgtccgctccgccccggctcttgatatcatcacaagtcttaaagagcagggcgctcacgtgaaagcgtatgatccgatcgcgattcccgaagcggcagcgatattaggagaaggcggcattgaatatcacgcagagatgtacagtgccatcaaaaacgcggacgcatgcctgattacaacagattggccggaagtcaaggagatggatcttcagagagtgaagcggctgctcaaacagccggtcatcattgacggcagaaatatgtttccgttggagtatatgagggtttcaggattcacttatcattccgtcggacgtccggcggttcatgccgatcggcaaataaaagaactggcaagatagaaaaagatttgtcttcaggctctcggcagcccggctcggctgccggttttggaaaggggtttgccatgtgagtatcaaacgttcagcggcacatgttcttgtgctgcttgccgctgtcattacaggaggattcatcatgctggaggcggtcagggcggatgccggcctcggaaaaatcaccgtgctgctgcttgccgccatgatcggtattgccggacttgctttgctatccgcctttacaacaaacggtcagatgtttatggggctcatttatatactgatcgcgtgtacatttttaaaccaggccttctttgcggttcatctcggatttttcagcttatttatataccggctgttattaatcggagcgggcgccctacacatcgccggcatcctgacaaaccgtcatcatattgacagatggaatcgggtgaatgtaaaaggggttctgatgtttttcgccttatggtttacatacggtctcctatcgttattgtgggcaaaatccgtgacgtacgggattaaatatttagctttaataggaatgggcatgtttttgatttatcttattgtcatgttcattcagcgctttgatcagctgatggttttttacggcatatggcttgtgatgaccatttttgtgatggcgatcggcttttacaaccattttacacacaaccatctgccgagctccacgctttataacggcccgcagtacaaacagcattatccgacgtccgttttctttaatcaaaatgatttcgcgacgtttttgtgcatcagtttctttctgtatgcggcggcggtgaaaaatatgaaaaacggctatgtgaaggccgtcagcctgctcttagcgatctgcgctttgtatttaatcattttgaccggttcgcgcgcgagtctgctgggcatatgcgcgggggcggctgtatacgtcttcatcctgctgccttctctgttgaaaaaattcgcgctgtacgctgcgggagcgggtgctgcgctgtttgcggttttatttgcgggccgtatcaccaatgccgtcttgaatctgttttcagctccgcaggcgatgccgggacagcagccgcttccttccaacctcgccagggcgaatcttttaaagaacgcctttcactatgtaattgattcctgggggtccggagtgggtgccggaaacgtctcttactatttaaaagcggagcccgtttatgatacgggcggcgtagttgaggtgcacaactggctcgtcgagattatggcgaacttcggcgtacttacgatgctcggttacctgacagtctatttgttccttttttggacactttataaatgtcatgaaagaaaatcggaaaatcagtcaagactgatcacagaaggacttatcacggcgatggccggttttttggtaagcagcatcagcccaagctccgtatcgaatttatttttccactgggtatttctctcgctcgtgatcgcggcggtcaatatattgaggcgtttacaaaaggagcctgccgtcacggcgtactatgaaaaacagggagatgcgagatgaaggatatgttgacaagaataacccggcgtatcaaaaagaatatcatttggatcattgcgctgcccgttgtgttaggggcggcgggatatgtattgccgtcaaaaatcagcggaaacagcagttttacatcagaagccgcgatcgccgcgggaaattatgatcatccgctttataacaatacaaaagaaatcccgctccttttgacgagcgatgcctttttaaagcaggctctgcctcataaaacagacgaagaaagagcggccgtgaaaagtaaactgactgtcgaaacacaatcagattcattgatcacggtcagctgcagcggccaaaacaaacaggaaaccgaatcggtgtttcaagccgtcataacaacttttctgaagaatgatcaggacctgtttgaaaaacgggcaaaagtagtgcggcagagtattgctgcgcttgaaggagaaaccgtcagcgcggacgccaaagtggataaggaacgatttttatacgaattgaaaaatacgcagctgaacctgaaagcggccggcgtcatcaattcagagccgatgaatgaaacggctggtcaaggcatgccgccgaaaaagaaagcggttctgggcgttttaatcggcattgcagttgcctttatgttcattgtcattcctgagttttttagagagtccttgtaaaaatctgcgatggagatgtgaccatgacaaactggaaacctttcgtatctgtcattacaccgtcttataacgcaagtgaatatatcgaagacacgattcagtccgttttacaccaaagccacccgcattgggaaatgattatcgcggatgattgttcaacggacggaacgagagatattttacggcaatatgaacaaaaagatgagcggatccgcgtcgtttatttagataaaaacgggggagccgcagctgccagaaatacagcccttaaacatgccaagggccgttatgtcgcatttctggacagcgatgacagatggaaaaaggaaaagcttcaaaaacagcttgcgtttatggcagagcggtcctgcgctttttcatttacgggctacagcgtcatggagcaggacggaacgccgacggacaaaacgattcaagcccctgaaagcctgtcatatgatgaagctttaaaaaacacgattatcggatgtttaacggtcatgattgacagagagcagacggggcagattcaaatgcctgatatcagaacgcggcaggatttagcgacatggctttccctgctgaaaaggggatttacggcttacggcctgaatgagtgcctttcagaatacaggcttgtgcagaattcgatttcaagcaacaagtggaaagccgcaaaaaaaacgtggtttgtttatagagaaattgagcgcctgcattttatcaaggcttcgtggtgttttatgcaatatgcgaaaaacgcggtcttgaaaagactgtaggcgtcagaggagctgggtgatgaaggtggaaccgattattcacgtaatcgtcggagcggcggaatgggggcatgaccggctgagatacagacggcatcggctggctgaatttcttgcccggcaaaaagaaacgaaaagcgtcatttgggtatgcccgtccccgcgagccaatgatgatcagatggccgggatcgccgagggaatccggcagttcactgtaaaggatctcatgcagcaaaaagcattccgtttcggcaggtatacagacatgtgttacaggcataaactttcaccattgttgcacatgctgaaggaagaaggagaaggggcccgctgctgcttatggtacaccttccccggtttcccgcttctggcagatctgtttccttgggatgaagtgatttacgattgcagtgatctgtgggccgctccgatcagcggccgggccggtgtgctgtcaaatgtaagaagaaacatcattaaacaggcggaaatgagaatcattcagcgtgccgattccatcacctgcacatctgactgtctgcaccgggaggtcggaaaaaagctggagaacccgcaccagaaagtgttcaccattgaaaacggagtggaatatgacctgttttcacgggaaaataaacagccggatgaagacattttacggggacgaaacggaacggttctcggttttatcggcggaatcaaaccaaagctcgattttgcgcttatggcggaaacggcagatttgcggcctgactggacgattttattggtgggcccgaacacggctcaggacgatccggatttcgagtcgcttctggaacgcccgaatgtcatctggacgggacctgccgcgccgaatgaagtgccgtcctatatgcagcttgtcgacatcggcatcatgccgtataaaaattcaccttataatgacgcggtatttccgcttaagctttttgaatttttagccgccgggaaaccggttgtcggctgcaacctttcttctacgtcaaaaatcaaaaggccttacgtttatgaatacgttgaagggagcgaccccgcagatttcatcgcggcctgcgaagcgcttctggcagcggaccgccgcggatcatacgaggctttgcgccgtgaattggcccggggacgggattggaatgttttattcggccgaatgcttgaatgcacgggtatattggaaaatgcgcaatcccattaaaagggaaagcgcattttttgatttgcgtgtttctttttgatgatgcttgttataataactagtaagaattataatggaaggaacggttcaatatcagaaaagacttcatataattccaaaggagacttctttatgcttgacgaacgcatgtttcgcatagttgttgcgttttttgtctctctgctaacggttttaatcctaactcctatcgtaaaaaaaattgcgatcaaaataggtgcagttgaccagcccagcaaccgaaaagtacatgataaaataatgccccgtatgggcggcttggccatctttatcggcgtagcggcgggtgtgctcgcggccggcatatataatgaaacgaaaatgaccgccattacggtgggtgcgtttattattgttattttaggaatccttgatgataaataccaattaagcgcaaaggtaaagtttttcgtccagctggccgtggccattatgattgtgagcacgggactgaaaatggactttttctccgtaccgtttttaacggaacgtttagaattgggatgggtcgcttacccgctgactgtgttatggatcgtcggtattacgaatgcgatgaacctgattgacggtttggacggactcgctgccggcctgtcggtcatcggactctccactatcgccgttatggcgttgtccggagggaaaatccttattctgtcactttcacttgtcgtgataggaagcacactcggatttttattttataattttcacccggcaaagatatttatgggagataccggatcgctctttctcggatacgtcatctcagtactctcattattaggtctttataaaagtgttactttattcagtatcatcattccgatcatcattttgggcgtgccgatttttgatacgacattcgccgtcatcaggcggattttaaacaaacagccgatctcagcgcctgataagtcacatatacaccaccggctgatggccttcgggctgtcacaccgcacggctgtcattatcatttatttaatcggctttattttcagcgtcagtgccatcctgctgaaaagcgcgaccatttggctttcgctgtttattatttttgtattgattgtatttatgcaaatcatagcagaggtcacagggttagtaaatgaacaatttaaaccatttaccaagttttacaaaagattggtaaagaaaaattaaaaagagcagatcatgcgaatggtctgcttttttgctattctcttattatatagaaaaacccgatcctgctcaaaggatcgggtttactcttaatagcctgttgtgccgccggactgtgtgctgtccgtaccgtttgcacctgcagtaccgttggttgaatcggttgtgccgcttgttcctgtgctgccggaagtcgaatcagccgtaccgcctgttcctgtgctgccggaagttgaatcagtcgtactgtccgttccggtgctgtcagaagcgggatcggatgccgtgctgtttccggacgggtaatccaggtgcttctgcaattcctgccgtactttctcgagattggttggatccggctggaaataatatgttccgcgcgtagttgcggttccgcctaaatataaatctgatcctgttatggtcagtgtatcaatctttttgctggtaaatccgctgtaaatctgctgaagagcgagtccttcagtgattcggatattcgtttggacattattgctcgctgtttcagcgattttatcgattttagcaatatttccagctctggacatttggtcgatcagtgcgtttaaaatttgcttttggcggtcattccggccgaagtctccgcgcttatcctgctttctcatccgcgcgtaagccaaagcctgctcaccgttcaaatgcatgtttcctttcttgaaatagatccgtttctttttactgacgtcactcatctcgtcgaagtcaaacggcacttttacatcgaccccgcctacttcatcaataacatccttaaagccattgaagtcgacagtgacatacttatcaatcggtatgcctaataagtcttcgacggttgagacggtttcatccgctccgcccttagcaaaagccgcattgatttttgttttgttgccggttgtgtcgccggcaagcgtcacccgcgtatcacgcggaatactcagcattttcattgttttatttctcggatcaagggtaacgacaataagagaatctgatcgtccgccttttccgctggtggcataattttcgatccccataaacaaaatggagaacggttttttcttcatattgatgactttatcccgcaattttgatttttctccgcgggaaagggcatcatatgcattatctgccgcattgatcgttttgtatactttgtatccgccaaatccggcagcaactaacaaaacgagggtaagcagcagcaaaatccgtttgaatatgatctttcgtttgcttttctttttctttcgaacacgcactcttacacgttcagccattacattagtctcctttagggctgacgtctgtttctaaatacgtcagttctccctctgtattcttactcttgccgttcgtcagttctgtcatccattttagaaacgcttctttgtctttttcttcaacgtacgtttcaaattcgacatgatccgcataatggatatctttcagtaaaaaaactgattctctcagttcgttctctatcttgccgagccacgtataatccgctgatgtatgcataatccgcatcagcttccgctccgtaactcctatatgatttaagccttcagacactgacttcccatatgcacgaatcaatccgcctgcaccgagctttattccgccgaaataccgggtaaccaccgcgcaggtatctttcagaccgcgttttttcagcacttccagcatggggacgccggctgtgccgcttggttctccgtcatcattggccttttgtatatggtcggtttcgccgatcagataagctgagcagttatgagtcgcattccagtgctgtttttttatcttttgtataaattcctgcgcttcctcttcagaagcagcacggctcaggtgacagataaaacgtgatttttcaatcacaatctcatgttcacccgtttctttaacagttaaatagctgtgcagcatgattgctggaccctcctgacaagcattaaaagacttgtttctacaaattcgaacagactttagaatttttgcgcatattttggtatcatgaaagagtaagatactatataaaaatgtttttttctagaatatacgcattctttcattataattcgacataaattgcagttcaattacatttataataaaaatacataacaacaccgttacggagggagacagatgaataaatcgaagatggactccaaagttttggattctatacttatgaaaatgctgaaaaccgtggacgggagcaaggacgaggtttttcaaatcggagagcagtcgcgccagcaatatgagcagctggttgaagaactcaaacagatcaaacagcaggtgtacgaagtcattgagctgggggacaaacttgaagttcatacgcggcacgcacgaaaccgcttgtctgaagtaagcagaaatttccataagttcagcgaagaagaaattcgcaacgcctatgaaaaggcgcacaaacttcaagtggaactgacgatgatccagcagcgtgaaaagcagctgcgggagcgcagagatgatttagaacgccggcttttggggcttcaggaaatcattgaacggtcagaatcattggtcagccaaataaccgtcgttctgaattacctgaatcaagaccttcgccaagtagggcttcttcttgccgatgcgcaggctaaacaagatttcggcttaagaatcattgaagcccaagaggaagaaagaaaaagagtttccagagaaattcatgacggtcccgcgcagatgctggcaaatgtcatgatgagatcggaattaattgaacggatcttccgcgaccgcggcacggaggacggatttcaggaaatcaaaaatcttcggcagaatgtgcggaatgccctttacgaagtcagaaggattatatatgatttaagaccgatggcattggacgatctcgggctgattcctacactgagaaaatatctttatacaactgaagaatacaacggaaaggtgaaaatacattttcagtgtatcggagacacggagaacaaaaggcttgccccgcaatttgaagtggcgcttttccgtctcgctcaggaagccgtcacaaatgcactcaaacattcagaatcagaggaaataacagtaaaagtggaagtaaccgctgattttgtcgttcttatcattaaggacaacggaaaaggctttgatattaaggatgctaaacaaaagaaaaacaagtcatttggcttgctgggaatgaaagaaagagtagatctgcttgaaggaacgataacgatagactctaaaataggtcttgggacatttatcatgattaaggttccgttatctctcggcctataatttgttaaatagagccaaaagacatattgaccgaacagcggcgtatatagaacaataggataaggaggcgtagcgtgtgactaaagtaaatattgttattatcgacgaccatcaactattccgtgagggtgtaaaaagaatattggattttgaacctacctttgaagtggtagcagaaggtgacgatggagatgaggcggctcgaatcgtcgagcattatcatcccgatgttgtcataatggacatcaatatgccgaatgtaaatggagtagaggctactaaacagcttgttgagctgtaccctgaatctaaggtgattatcctctccatccatgatgatgaaaactatgtgactcatgctttaaaaacaggtgcaagaggctatctcctgaaagagatggacgcagatactttaatcgaagcagtgaaagtggtagccgagggcggttcttaccttcacccgaaagtaacccacaatcttgtcaacgaattccgccgtcttgcgacaagcggagtttctgctcatcctcagcatgaggtttatccggaaatccggagaccattacatatattaacgagacgggaatgtgaagtgctgcaaatgcttgcagacggaaaaagcaaccgcggaatcggtgaatcattgtttatcagtgagaaaacagtgaaaaaccacgtgagtaatattttgcagaaaatgaacgttaatgaccggacacaagccgttgtcgtagccattaaaaacggctgggtagagatgcgttagtcatgtatgagaagacttgccataataggcaagtctttttttacagcttcatatctattaaaatacttattaagtacttaataaggcaggtaaagtgatgaagattgcagttgtaacagacagtacagcatatattccgaaagagatgagagaagaacatcatattcatatgattcctcttcaagtggttttcggtgaaaaaacattccgcgaagaaacagaactcgactggagaagtttttataaagaagtaaaaaatcatgatgagctgccgactacgtcccagccttctttcggtgaattaatcgcattgtacgaagaactgggcaaaacatatgacgcagtcataagcatacatttgtccagcggaatcagcggaacttataacagcgccgcctcggcaaacactatggttgatcatattaaagtttatccctttgattcagagatcagctgtttggcgcaaggtttttatgcattaaaggcagcacagctcattaaagacggtgttgactcaccggaagagattattaaagagctggaagaaatgaaaaaaacagtccgtgcgtattttatggtggatgatttatcacacctccagcggggcgggcgtctaagcagtgctcaggcttttatcggcggtctgttaaaggtaaagcctattcttcattttgacaataagataattgttccttttgaaaagattcggacacgcaaaaaagcgatttcgagaatttttgaactgtttggggaggatgcaagtaaaggaatcccgatgcgggccgctgtcatccatgcaaacagggaagaagaagcggcggatattatacaggagttaagcggtaaatatcctcatgtcgaattctataacagctatttcggtgccgtgatcggaacccatttgggcgaaggcgccatcggaatcggctggtgctttaaaaactaagtgaaaatctccgttttcaagggcggagatttttttattattaaattttcgtgattcgacaaaaaaattcccggcaggcatactttgaacagaaaggaggcagggagatgtccgaaggtgcttcagaattttcagaggtgcgggatttcttttacggccggcatttattgagatctgagataccgttttcagatcagcgcatcaaccgttttatagaaaaagagcatataacggccgagccgtcaatcatccgccggaaaaaccgttacgtctgccaacgatgcggtcagtctgatcaagcctgctttgcggcattttgggcgccctctgccaaaaggcagattacctattgccgtgcctgtgtcatgatgggaagggctgatgaactgacatcattatattcttggaatcaagcccctgaaaacagctgggagcctgtaaagctttcttgggaaggaacactgacagacggacagaagcaggccgccgccgcgcttacagatgcgataaaagagagacaagagctgttagtatgggcggtttgcggatcggggaaaacagagatgctgtttcctggtatcgagtttgccctgaatcaaggtttgcgcgtctgtgtcgcgactccgcgtacagatgtcgtacttgaactgctgccgagactgaaaaaagcatttgagaaagtcgacgtttctgctttgtacggcggcagcgaggacaaaggccgcttgactccgctgatgatttcaaccgctcaccagctgatgcgctaccgagacatttttgatgtcatgataatagatgaagtagatgcgtttcctttttcagccgatgagacattaagattcgctgttgataaagcgaggaagaaaaacagcgcccttgtttatgtaacggcaactccttcagacacattaaaaaagaatgctgaagccggtttgctgaaaagcgttcgcataccggccagatatcatcggaaacccctgccggagccgcgttttttgtggtgcggcaattggaagaagaagcttcagaaaggaaaactgccgcgctctgtaacggattgggtccgccaaaaacttcaatcacagctgccggttttcttattcgttccgtctgtacacgtattgaaaaagacaacggattattttcagaaattaaacatacgggcagaaggcgtacatgcggaagacacattcagaaaggataaagtgaaacgattcagagacggccggcttgatctgctggtaacgactacgattttagaaagaggggttaccgtgcccaaagttcagacatgtgtcctcggcgcagaagcacctatctttactgagagcgcgctcgtacagatcgcgggcagaacgggaaggcattataaacatttcagcggtgatgtcgtcctgtttcatttcggaatgacaaacggaatgaaaaaagcaaaaaaacatatagaacttatgaacaaattggcacaaaaaagtaaattgttggactagttaatttcagaaaacatgatacagtatactcatactttcctatgaggagctgtcagcatgcttgtcaattctaaagaaatcatattaaaggaacttctcgaccgccatatgcctaagcttcatatgaaatgcacatgccgggtatgcaaaaatgatgtactggcactttcattaaaccgggctgagccggcatatgttacagataaaaagaaagttgcttatgcaaaagcagagatagttgataaacagaaaaatacggcgctgcttgtcattctggctgaatcagccgcgattgtttcggttaatccaagcgagttctgtgaaacttgggaaggagcgtaatatctctgaattgtttattgtgtgactcaccaatttcaagttcattgacttggagatctttgttttctctggcgcccgagcaagaggtatgcaccatatgcagcagccgattcgaaaaaattgaaggccccgtatgcagtatatgcgggaggcctcaggagtcaaatgaaaaatgcgctgattgtgcggcccgggaatcaaaaacggaaaagcgctttttgctgcggcaaaaccgttcggtatatttgtataatgatgcgatgaaggactcattagcccggtttaaattcaggggtgatgcgaaaatcattcaagcatttggacgtgactttgctgccggctttaaagcggcatatccatcaaatacacatactctcatccctattccgctgagcggcgaacggctggcggaacgcggattcaatcaatccgagctgctggcctctctgctcggaatgcccgtcattttccccctcatccgactgaacaatgaaaaacaatccaaaaagagcaaaacagaaaggctgtccgcagaaaaaaagttttcagcagccgaaaactcggccgaaggtatgaacgtcatcttaatagacgatatttatacgacgggcgccacactgcatcaagccgccgaagtcctgctgacagcgggtaaagcgtcatcggtctcctcttttactttaatcaggagctaaatcattctttttttctgccgatataattgatagaaatataaggcagattaaagaaggaataggagttaatacgatgggtgaattggcgaattgtccaaaatgcaatgctttattttttaaaacgaacctgcagaccgtgtgccaggcatgtattaaagaagaagaaaaagcatttgaaaccgtctataattttttgagaaagcagatcaacagacagtcgacgatgcagcagatcactgaggaaacaggtgtggatgaagagctgatcctcaagtttatcaaacaaaaaaggattcagatcagccagcttccgaatttggcatatccttgcgaaaggtgcggaaatccgatcaggacaggaaaattttgcaagtcctgtcagacagatattgagtcgcaattagaccatatgaaccaaaaaacagccgctgaattcaaagaaaaaaacagtacaaaagacacatactatgcctataataccaaaaacacctgattccctaaactaactgataacgcagtcgataaaagaattagactgcgaacagaaagcgagaggaatcctatgaaaatcaatcagtacggaacacaatccgttaatccataccaaaaaaattacgaaaagcaagccgtacaaaaagaggctgcaaagccgaaggacaaagtggaaatttcttctcatgcaaaagagcttcaaaatgcgtcagatgcggtcactaaaacacgtcaggaaaaaatcgctcagcttaaagcggatatagagagcggaacatataaaatagattcaaacagcatcgctgaaaacatagtgaatttttataaaaagcaataaaaaggagaaagtcaatgtctgcaaagccaattattgatcaactgaagcgactttgcgcactgcatgaacatctgctcacgctgtctgaggagaaaacggaagcgctgaaagcaggtaaaacaaaagagctctccaacatattgactaaagagcaaaagtatattcaggcaatcgggcagactgaggaagaacgaatcaggttaacttctcagtttctcagccgcggtgaggacaatacaattgctgcatgcatctccagaacttcaggcagtgaaaaacaggagcttgaagggttatttcactctctgtctgcgcttcttgaccgtctgaaagaagtgaatgagatgaacaaacagctcacgattcaggctttacaattcatctccggggcattcgatatgatcatgccgggtgaaaaagagaatatgaattataaagagccgcaagcggcgcgcaagcctgtcagccgtttgacattattcgattcaaaagcttagaacggaggattttcaatgccatcgacttttatggggctcgaaacagcaaggcgtgcattgagtgcgcagcagactgcattgagcacagtttcaaataacgttgcaaatgcaaatacagaaggatatacgaggcagcgcgtcacattacaatcgacgagcccttatcccgcagtatcaaaaaacagtgatctgacggccggccaaatcggaacaggagtaaaagccggttcagttgagcgcgtcagagacagttttttagactatcagtacagaacggaaaatacaaaattagggtactatacagcccgttccaattcattgtcgcaaatggaaggcgtcatgaaagagcttgacaataacggattaaacggatcgctcagttcattttggaatgcccttcaggatctggcgacgaatccggaaaatacgggagcgcgctcagttttgcaggagcaggggaaatctcttgccgaaagttttaactatatatctacctctttgactaacattcagggtgatattaaaaagaacctggataacacagctgatcaggtcaattccattctcaatcagctgaatgaccttaacaatcaaatagcggcagttgagccgagcggtatgctccctaatgatttgtatgaccaaagagacagattgattgatcaattatcttctatggcaaatataaaagtttcatataataagtcgggcggacatgccttggcgactgctgagggcacggttaacgtcgaattgctgaacgggaacaacaattctctcggaacgctgctcgacggtaacacaaaaacagtttcagaaatgaaaatcaactacgacaaggacagcggactcgtgtcgagtgtgtcagtcggcagcagtacggtcaatgcggatgcatttaccggaaaaggctcacttttaggtcttattgaatcatacggctatatgtcaaacggagaagaaaaagggctttatcctgaaatgctgacggctcttgacaatatggcgctatcctttgctgacgcgtttaatgcagttcatgaaaaagggaagacctatacaggcgaacagggtgcagcattttttgatttcagcggtgatgaagcggtgccggcaaaaggtgcggcagcgaaaataaaagtcagtgacaaaatccttgcgtctactgataatatcgcagcgtcgttaaacggagaaaaaagtgacggcacaaacgcgacaaatcttgcagccgtacagaacagcaagctgactattaacggtgaaaccactacaattaatgacttttatgaatcccttatcggaaagctgggcgttaattcacaaaaagcggctaatcttatgaacaactctgaaagcaacaccctttcagccgatgaacggagacaatcagtcagtgcagtgtctttagatgaagaaatgacaaatatgattcagtttcagcacgcttataatgcggctgcgcggatcataacgatgcaggatgaaatattcgataaaattattaacggtatgggcaccggaggaagataggagataagtaaatgagagtaactcaagggatgatcgcaaaaaattctcttcgatttatcggctcaagttatgacaagctcgatcggcttcagcagcaagtgtctacggggaaaaaaatcacgaaagcttctgatgatccggtcgtcgcaatgaagggaatgcagtaccgtactcagcttgcgcaggtaaaccagtaccaacggaatgtttcgcaaggttttacatggctggaaaactcggaatcaagcgtaaactcggaaacggatattatggggaaaatccgggacttgatggttcaggcgaaaagtgattcgaacggtgaaacagaattgaaagcaatcggtacagaaatcggccagctgaaaaagcagctcgtttctgtcgcgaatactcaggtaaacggacgttatctgtttaacggaacgaattcagatgtcccgccgatcactgaaaatgccgacggcacatatacgtacaactatgagaattataccggtgcttcggatgttaacatcaacatctcaaacggagcagtgctgaaagtgaattctgatccaaactcagctttcggaggcgtcgcacaaaatggagataatgtatttgaatttctcaactccttagaagcttctttaagcaaaggcacgctgtccgaagcagattcaaatcaaattctgtcagatatcgacggttttactgacaaaatgaatgctgaaaaatccaatatcggcgcacgcacaaaccggttggaactcattcagacaagattggaatcacaagcggcaaccgctgaaaaagtattgtcggataatgaggatgtagaaatggaagatgtaattgttgattatttatctcaacagacggttcatagagcagcgctgtcagtgaatgcgaatatcattcagccgtcactgatcgacttcctgaaataatataactatcgtcttcaatatataaaaaaagcgactcacaacagggagatcgctttttttactaaaatactataaacaggagggatctctgtgcagatgccgagattgattattgacagtgtgcctgctaaaatcggtataacctttcaaaaggaagaaatcgagatggaacagccgcccgctgacctggaaatcgagcagccgccggcagagctgaacatcgaaagcacgccggccaaactgacgattgaccagacgagggcgtgggagaacttgaatctcaaatcatttgaaaagctgaacgctgaagccgctcaaaaaggtgcggaagcctgcagcgagtttatcgcaaaaacagtcagggaagggaaggaaatggcggctatcgaaaagaaaacgggcaatgtgatggcccggcaggcagcagatgtcagtccgcccgatccattcggcgaattcagcgactttctgcctgcgcagtttctcgtcgacattgactgcattccttcaaagcttacgattgatattgaagcccgcaaaccttcaattgaagcagctgtcaataaacctgtatggaattatacgccggggaaagttcagattgatatgatgcaagaccctaaggtgacgatttcggttgatgatggcaacgcagaataaaagatgaaagtggtaaaggattgtgaaggatgataattaaaacaaaatatcacggagaaatcagaatagatgaagggcagattatctcatttgaaaacggcctgccgggatttaatgacgagactcaatttgttgttcttcctttgtcggaagattcaccgtttttggcgctgcagtctgtgaaacaggagcacatcgcctttattgtcgccagtccgtttattttctttaaagggtacgaatttgacattgaccaagcgacgcttgagcttttgcatattgaagatatagaggacgtcgaagtgatggcgattttaacgctggaagagccttttgaaaacacgaccgccaatttaaaagcgccgattatcgtcaataaaaaggaaatgaaggcgaaacaaatcattttacatgatgcttcctatgaaacaaaacatctgataggaggaggatcatgctagttctctcaagaaaagtgaatgagtccattcagatcgggccggatattgaaataaaggtgatcgctatcgaaggagaacaagtgaagctgggaattgaagcgcctcagcacgtagatattcaccggaaagaaatctacttgtcgatcctggaagagaacaacagagccgtatcttttaatactgatttattacttaacttatcctcacaaaaaaagtgaggatttttttattttcaatataaacaatggaagcggccgtccgatatatatattgtagccaatgagaggaaaaattttcttcagaaatgacgctgcgcaaatgcacaaggacgtgcgaaaaacaattcagggaggaaatacaaaatgagaatcaaccacaatatcgcggctcttaacactagccgtcagctgaatgcaggttcaaactctgctgcaaaaaacatggaaaaattatcttcaggtcttcgcatcaaccgcgctggtgatgacgctgcgggtcttgcgatctctgaaaaaatgcgttctcaaatccgcggtttagacatggcgtctaaaaacgctcaagacggaatctctcttatccaaacatctgagggtgcattgaacgaaactcacagcattcttcagcgtatgagcgagcttgctacacaagcagctaacgatacaaacacagattctgaccgttctgagcttcaaaaagagatggaccaattagcgtctgaagtaacaagaatctctactgacactgagttcaacacgaagaaacttcttgacggaactgcgcaaaacctgacgttccaaatcggagctaacgaaggccaaacaatgagcctgtctatcaataaaatggactctgaaagcctgaaagttggtacgacttatacagtatccaatgatcaaaatacattgacatcaactgacggaaaaagcactgctacttgggcggatgaagtaacagatccagatggtaaggttacaaaagcagccggctattatgatactgacggtaaagttattgcatctgaaaaattagctgcagattctaaagtaacaaaaggtatcgacatctcttcttcagctaaagctgcgtcttcagctcttacaacaatcaaaacagctatcgacacagtatctagcgagcgcgctaaacttggtgcggttcaaaaccgtttagagcacacaatcaacaaccttggtacttcttctgagaacctgacttctgctgaatcacgtatccgtgacgtagacatggcttctgagatgatggagtacacgaaaaacaacatccttactcaggcttctcaagctatgcttgcgcaagctaaccaacagcctcagcaagttcttcaattgcttaaaggttaatgacggaaagatcctggttctccagggtcttttttttatttcttcagctaactcctccttcagcaagccaaagaaccctattgacaaaatgaaacattatattttgcagttaaattattgaaaaccttttaatatgaccgatataagaataagatcatacatttatggagctgtgatatgataaacagtcggaaactcactgttgtcatagagccgtctacgactaaacgccgaaaaggagagggtacatatggtcacaagaatcacaggccttaattccggtcttgatgtagattctctggtgaaaaaaatgatggatgccgaaaagcagccgcttaataaattaaaccagcaaaagcagacgcttgaatggaagcgcgatgcttatcgggaaatgaatacccagattgccgacatgtattctactacatttaataatatgctgatgtccacaaactggaataaaaaaacagtaacaagttcggattccagtgtcagcgcggtggccgtcagtgccgaacagaatatttcaacgagcatgtctgtacagcagctggctacgccgacgacttataaatcatcaggggccatcaatttcacttcgggtcaaagccaaacattgaaattcaatgtcacaaatccgggggaaacgaagccgactgaggtaaacgtcacgatcgccgcaaccgatacgattgacgatgtcatttctaaactgaacagctcgggtctcggagtgacggctttaaaagagaaaatctctaacggctcggattatgtggacacgattgcgttcacttccaataaaacgggggaagggtttaccctttcagcaggtgatgacgcgaccaaaagctttctgaaagatcagctcggttttgccgttgatgatgcaacaaatgcactgacggccaatgccgaagggaaaaacgcgaagtttacgttcaacgggcttgaaatgacaaaaacgtcaaataactttacgatcaacggcatcaaatacacgctgaacagcgtgacggacagcaacaaaacggttacgattaacagcacgactgatacggacggcatttttaacaacattaaagatttcgttgataaatacaatacgttaattaaaagcgcaaatgagaaggtgacagaatcaaaataccgtgattataagccgctaaccgatgaacaaagagaagcaatgaccgataagcagattgagcagtgggaggcaaaagccaaaagcggtttattacggagcgacagcacgctgcagaacggtttggcggagatgcggcttgatctgtactcaacggttacgattgacgggaaaaaatatcagcttgccgatttcggaattgagacgtctgatagttatacggatcaaggaaagcttgtcattaaagacgaagcgaaactgaaacagaaaattaccgagaatcctgctctcgtggctaaactgtttaatgcagacagccctgatacagcgaaaaccaaaaacccggaggaacaggggattgcccggagattaaaagacacattaaacaaaatgcagattcaaatttcaaaacaggcgggtacggaaagctcggtatcaaccagctttgccatcggaaaaagcctggatgaaatagaaacaaatatttccaatatgaaaacgaagctggatgacatcgagacgagatattataaaaagttcagcgcactggatacggcattggagaaattgaacagccaatcttcatatctcacgtcaatgttaggatcttcaacttcataaccttgggggttttataaaaatggcaataaataatccttttgctgcttaccagcagacatccgtctttacagccgctccggaagagctgacccttatgctttataacggctgcctgcgattcattaagctggcaaggcaggcgatgaagcaaaacaaccttgaagccaaaaatgaaaatatcgtaaaggcgcaaaacatcattcaagagctcagcatcacgttaaaccgggagattgagatttccgagcagatgtcatccatttatgattacatccgccgccggctgatcgacgcgaacgtgcagaataacggagagtttttagatgaagcggaaaagctcgttactgaatttcgcgacacgtggaagcaggccatgcagagtgaacggaaaaacagccatggcgcgggcggccttgcctgatgaacagcaatgtcttttctttgtataacgaaacgaagaacatgtacgccgcactgaaggacgccccggaaagcgacggtctcatcagcagcgttacggcatttacggagaaaagggaggagatgcttgcgggcataaagccgcctttttccgaagaagaaaaaacgctgcttcagcaggtggccgcgatggaccgtctgattaccggcgaagtgaaacggattcaggatggtatccgaaatgaaataaaaacgcttaagaaaaaacgaatctaccataatacgtatttcaatccgtatcagcaaacgacaagtgacggccgttattacgacaaacgcaaataggtgagtgttttgagaagtttgaacgattaccatttggtgtcagcctattaccagcttctttttacgattgatgaggggctttgctacctgttggacacgcaggatgatttttttaagacggagggcgagcggatttacaacgatttgattcaggctttttttcatctcgattcctctcatgcgcttctgctgtctatcattgagtgccgatgcgtggagacggcgatccgctcatttgacgagatctttcaggatttcagcatgttaaatgattatgatttcccgtccgccccttttcaggagtttttaaaaaccatctttctgccgcattataagctatggatggagcagacgcacgactgtatcaaaccgtatgttcttcactagacctgctgcaagcggcaggtcttttgcctgcgtcctttgcatatacttataatcctgccggaagctgccggataaaaccgacaccattcgtcatcgttcaccgaatttacacattattttaacgtttcagcagggatcagaaggggtaaaagagaaatagttacatatccttagataaagggaggcgttctttgatgaactacaatatcagaggagaaaacattgaggttacacctgcgttaaaggatcatgtggagagaaaaatcggcaagctggaacgatatttcgagcagagcgtcaatgccgatgtgaacgtcaacttaaaattctataacgataaggaatccaaagttgaagtcaccattccgatgactgatctggcgcttcgttctgaagtgcataacgaggatatgtacaatgcaattgatctcgcaacaaacaagctggaacgtcaaatccgaaagcataaaacaaaagtcaaccgaaaattccgcgagcagggtcttccgaaacattatttcgagaacggcagcgctgctgatacgggcgtagcggttcaggacgaaattgaagatgacagcccggaaattgtccgtcaaaagcgttttaatttaaaaccgatggataatgaagaagcgattctccaaatgaatatgctcggacataatttcttcgtattcaccaacgcggagacgaatctcacaaatgtcgtttaccgcagaaatgacggcaaatacggattaattgaaccgactgaataaacccacccagccttccgtgaacgcgcggaaggtttttctctatctttatctgcaaattctttggaaatagcaaaaggtatgttatgataatgagaggtatacatggacagaaaattatcatttattccatgcaaaatctgcatgtgaacatagaggagcgttatagatgcttgggattttaaataaaatgtttgatccgaccaaacgtgcgctgaacaaatacgaaaaaatagcaaatgacattgatgccgtaagaggagattatgaaaatctttctgacgaggcgcttaaaaataaaacggcagaatttaaagagcggcttgaaaaaggagaaacgacggatgaccttcttgtcgaagcgtttgccgtcgttcgtgaagcttcccgccgcgtaaccggcatgttcccgtttaaagtgcagctgatggggggcatcgcccttcatgaggggaacatttccgaaatgaaaacaggggaagggaaaacgctgacgtctacgcttcccgtgtatttaaatgccttgacgggaaaaggcgttcacgtcgtaacggtcaacgaatatctggcaagccgtgatgcccagcaaatgggagaaatctttgcgtttctcgggcttacagtcggcctgaacctgaattcaatgtcaaaagacgaaaaacgcgaagcttacgcagccgatatcacgtattcaacgaacaatgaactcggctttgattatttgcgtgacaacatggtgctctataaagaacaaatggtgcagcgcccgcttcattttgccgttattgatgaagtcgattcaattttagtcgatgaagcgagaacgccattgattatttccggacaagctcagaagtccacaaaactgtacgtgcaggcaaatgcgtttgtccgcacgctcaagaaagatcaggattatacgtatgacgtcaaaacgaaaggcgttcagctgacggaagaaggaatgacgaaggctgaaaaaacgttcggcatcgacaacctgtttgacgtcaaaaacgtggccttgaaccaccatatcaaccaggctttaaaagcccatgcggcgatgcagaaagacgtggattatgttgttgaggacggccaggtcgtcatcgttgattccttcaccggccgtctgatgaaaggacgccgctacagcgaaggtcttcaccaggcgattgaggcgaaagagggcctggagattcaaaatgaaagtatgacattggcgacgattacgttccaaaactatttccgtatgtacgagaagctggccggtatgaccggtaccgcaaaaacggaagaggaagaattccgcaatatttataacatgcaggttgtatccatcccgaccaaccagccggtcatccgtgacgaccgtccggacttgatctaccgctcaatggaagggaaattcaaggcggtggcggaggatgtcgcccagcgctacatgaccggacagccggttcttgtcggtacggttgccgttgaaacgtctgaattgatttctaaacttctgaagaataaagggattccgcaccaggtactgaatgccaaaaaccatgagcgtgaagctcagattattgaagaagcgggacaaaaaggcgctgtcacgattgcgaccaacatggcgggacgcggaaccgacattaaactcggcgaaggcgtaaaagagcttggcggtcttgcggtcgtcggtacggaacgccacgaatcccgccggattgacaatcagctccgcggacgttcaggacgtcagggagacccgggcatcacacaattttatctttcaatggaagatgaattgatgcgccgtttcggagctgaacggacgatggcgatgcttgaccggttcggtatggatgactccacgccgattcagagcaaaatggtgtcacgcgccgtggaatcatctcaaaaacgtgtcgaaggaaacaacttcgattcacgtaaacagcttcttcaatatgacgacgtgctccgtcagcagcgcgaagtcatttacaagcagcgttttgaagtcattgactctgaaaacctgcgcgacattgtggaaggcatgatcaagtcttctctggagcgtgcgattgccgcttatacgccgaaagaggagcttccggaagaatggaatcttgacggcctcgtggagctggtgaattcaacgtatcttgatgaaggcgcgcttgaaaagagcgatatcttcggaaaagaaccggatgaaatgcatgagatgatcatggaccgcatcatgacaaaatataatgaaaaagaagagaatttcggtacagagcagatgcgtgaatttgaaaaagtcatcgtattgcgtgccgttgattcaaaatggatggatcatattgatgcgatggatcagctgcgtcaagggattcaccttcgcgcttatgcgcagacaaatccgctgcgtgaatatcaaatggaaggcttcgcaatgtttgagcacatgattgagtccattgaggacgaagttgcgaaattcgtcatgaaggccgagattgaaagcaatctggaacgcgaagaagttgttcagggccaaacgacggctcatcagccgcaggacggcgatgaggccaaacaagcgaaaaaagcgccggtccgcaaggttgtggatatcggacgcaacgcgccttgccattgcggaagcggaaaaaaatataaaaattgctgcggccggacagaatagtctcgactgtatgaagcgaacatgaccgggtctgcgtcttatggcgccccggatcttttaatgaggtgaatggaatggaattatcagaaatcagggcagagctcgaaaatatggcttctcgtttagcggacttcagggggtctctttgacctcgaatcaaaggaagcccgcattgcagaattagatgaaaagatggcggaaccggaattctggaatgaccagcagaaggcccaaaccgtcatcaacgaagcgaacggtctgaaagaatacgtgaactcctaccatcagctgagcgagtctcacgaagagctgcaaatgacacatgatcttttaaaagaagaacctgaccaggaccttcagcaagagcttgaaaaagagctgaagtcattaacgaaggaattgaatgaatttgagcttcagctgctgctcagtgaaccatatgacaaaaataacgcgattttagaacttcacccgggcgccggcggtacggaatcccaggactggggttccatgctgctcagaatgtatacccgctgggcggaaagacgcggcttcaaagttgaaacgcttgattatctcccgggagatgaagcaggaattaagtcagtcacactgcttattaaaggccacaatgcatacggctatttaaaagcggaaaaaggcgtacaccgcctcgtgcggatttctccatttgattcatcaggccgccgtcacacgtcattcgtgtcatgtgaagtcatgcctgaattcaatgaagaaatcgacattgatattcgtaccgaagatattaaagttgatacgtaccgggcgagcggtgccggcggacagcacgtcaatacgactgattcagccgttcggatcacccacctgccgacaaatgtagtcgtcacatgccagacggaacgctcccaaatcaaaaaccgcgaccgggcgatgaaaatgctcaaagcgaagctgtatcagcgcagaattgaagaacagcaggcggagcttgacgaaatccgcggcgaacagaaagaaatcggctggggcagccaaatccgctcgtacgtcttccatccgtactccatggtgaaagaccaccgcaccaatacggaaatggggaacgtgcaggcggttatggacggagatatcgatatcttcattgacgcctatttacgttctaaactgtcgtaatccgggaacacacctgcctttggcaaggtgtgtttttttatccgttctctttttccatttttcacaacagcgctttagcaaattaatacggtatttggctgttatttacttctaagccgggaagacttaaaatgctatcgagagaaaatcggagaacggaggattttgcatggatgtgaatcacaataagccgctccgtctgatcaaagattacatatatatcatgatcggcgcggcgattacgggggtcgtgtttaacgtatttttgctgccgaaccgtatagcagcggggggagtaagcgggatcagcaccattttagaaacgtttggttttgaaccggcttatgtgcagtggattattaacatccctttgtttatcgccggagtgatcattctcggcgggaagttcggaatgaagacactggtcggttccatcgttctgccgcttgccgtctttttaacaagagatctgcctgccgcgacgacccatgaactgctggcggcgattttcggaggcgtcgggatcggaacgggaatcggcatcgtgtatctcggcaaaggctccacggggggaacggctctggcggcgcagatcattcacaaatacacggggctgtcgctgggaacgtgccttgccatcatggacggattaattgtgctgagcgcgatgctcgttttcggagtggagcagggactgtatgcgatgctcggggtatttatttcaagcaaaacgattgatgtcgtgcaggtcgggttcaaccgctccaaaatggctttaatcattacgcagcatgaagaagccgtcagatcagctgtgtttaaagaaatcgacaggggtgtgacgaagatttccgcagtcggcgggtatacggaacatgaccggccgatcttaatgtgtgtcgtcggtcagaccgaattcacaaaactgaaacaaatcgtcaaacaaattgatgagtcagcctttgtcattgtcgcagacgcaagcgaggtgctcggcgagggtttcaaacgcgcgtaaacgaggttataatagcgaaggggtgcatcttacatatgaaatcaaaatgggcgctgctggcgctggttctgaccatgtccgtcctgctggcggcatgcggcggatccaatgaatcgaaaaaagaaagctctgacagctcaggcggatcaaaagcatctgcgtcagcgggtgaagaactttatcagcaaagctgtatcggctgtcacggtaaagacctagaaggcggcggaggtccgaatttacaggaagtcggcgggaagtatgatgaagctaaaattgaaagcatcattaaaaacggacgcggcaatatgccgagccatcttgtaaatgatgaggaagccgtgaagatcgcaaaatggctgtcacagaaaaaataacagaaaaaccttgcctgttataggggcaaggttttttctcggtctgggaatgaaaagaaactgtaatagtaatatgtctaaatttgacgtataatgaagtgtactgaggaaaaggaactttcagatttttcatctgtttcctgacgaatcggccataaaccgctgtatgtttgcgaactctatggctgcaagacataaataaaagattaggtgatttcatgatagagatgaaagaagtatataaatcctatccgaacggtgtaaaagcgattaacgggctgtcagtcatgattcatcccggggaatttgtatatgtcgtaggaccgagcggagccggtaaatctacttttattaaaatgatttacagagaagaaaaaccgacaaaagggcaaatattgattaatcataaagatctcgcggctgtgaaagaaaaagagattcctttcgtgcggcgtaaaataggtgttgttttccaggatttcaaactccttcctaaattgacggtatttgaaaacgtagcgtttgcgcttgaggttatcggagagcagcagtcagtcattaaaaaacgcgtgctcgaagtgctcgatcttgtgcagctgaagcataaagcgcggcagtttcccgaccagctttccggaggagaacagcagcgtgtttccatcgcaagatccatcgtcaacaatcctgacgtcgtgatagctgacgaaccgacgggcaaccttgatccggtaacatcatgggaagtgatgaagacgctggaagagattaataaccgcggaacgaccgtcgtgatggcgacacacaataaagaaatagtaaacaccatgaagaaacgggtcatcgcgatcgaagacggaattattgtgcgtgatgagtcaagaggggagtatggttcttatgattaaaattctcgggcgccatttgcgtgagagttttaaatctctcggaagaaacacgtggatgacatttgcatccatcagtgccgttaccgttacattgattttggtcggcgtgtttttagtcattatgctgaatttaaacaacatggctaaaaatgctgaaaaagaagtggaaattaaagtattaatcgatctgacgtcaaataagaaaacgcaggatacgctgcagaatgagataaaagacatttcaggaatccaaagcgtagagttttcatctaaagataaagagcttgatcaattggtcaaaagcttcggcgacagcggaaaggccatgaaaatgcaagatcaggaaaacccgctgaacaacgcgtttatcgtcaaaacgacagatccgcatgatacgccgaaagttgcgaaaaaaattgagaagcttgatcatgtgtataaagtgacatacgggaaagaagaagtcagccgtctgtttaagatcgtcggggtgtcacgcaacatcgggattgcgttaatcatcggccttctgttcacggcgatgttcttaatttcgaatacgattaaaatcacgattttcgccagaagaaaagagattgaaatcatgaagcttgtcggcgcgacaaactggtttatccgctggccgttcttcctggaagggctgctgctgggggtattcggttctgtcataccgatcgctctcgtgctgagtacgtaccagtcgatggtcgcttgggtggccccgaaagttcagggatcatttgtttcacttctgccgtacagtccgtttgtgtttcaagtatcacttgtgctcattctgatcggcgcggtgatcggagtatggggaagtctgacttccatccggaaattccttcgtgtataaataaaaaagccagtctgatacagactggctttttttaatggtttcgttactgaatgacgggcagggccggtgatccgggctttaatgtaaagtcataagacgattcgtcacggtacatcgggtccgcataaatggaatccgaatcgtttgccgttccttttcggtacgctgtgaatgaatcatattctctgttcttccaattccagatgccgtcttttccctcttctttgtgatagacgttatgattaacggtattttcttcgtttttcgtaaaatcatttgcgataaaaatccgtgaatcgcttgccgtcatgatgtttttttcgatcgtgttcccttttgtgccgtactgcaggagcagctggccgccgtcaaggtccttcgtgtcatttcggtacatgatgttgtgagcgatcaccgaattgatggtgccgccgcgtttcgtgtcatagcctccgattgaaataccggtgtatgcattgccgtacaccttgttatccgtaatccggatatctcgtgcgtatttccctttatgctcagaggtggcttcaatcccaaggtcattgttgtaaacggtgtttttcttaatgtccacatgttctgcgccgtcaacgtaaataccgcccgctgaatattcatctccgtaagcgggatttccgtaagaagagttatggctcaccgtattgttttcaatgacgccgtttcgcgcatagtcgttttgcttggacgttccttcgtatccgatcacgtcaatcccgatattgttattgtcccggatggtattgccggcaatcttaaatccgtcgacattcccgttcagcacgaccgcttcgcttgcgccgagcgtcagtttttcaaccgtattatttgtaatgctgacatccttcatggcacctgtgccgtaaaatgcgatgccgtgtgcatttccttcatcagccgtggttttaatgttccggatatggttgccgtcaatgttgatatgactgcttgatccggtgacgcagatccccatggccgtcgcatcttctgatgatacggagagattctcaagcgtaacgccgtgaatggtaatgtactgtttattgcggatttgaattaacggagtttcagaatcgctttttggcgcagatttgccgctgattgagacatgctcattctgatagttccgaaatgtaatcggcttttcggccgtgccgctgtgctttacttcaaacgtttcatcgtacgtcccttcccgaatcaatacggttgttccggcctctgccttttcagccgcatgttttaatgtgcggaacggcttttctttcgttccttcatattggtcgctgcctgcgggagaaacatacaaggcgtccgtctgcgctttctcattggcctctgtttttggccagacaaaggcggtaatgcctgcggccagaaccgccgcggataaaatcgataattttattttcatatcgcattctcctgtatatttaatgaattgcatacaaaatattatacgttacccatatatatgaaacaatctcgctttttcatttttttgttgccgttacatgaattctttgcaatttacacatactatctccaggttttcgttaaaggactaagaggaggtaaacgatgaagcagaaaatgatcgcagtgatagcggccctaagcatgatgtgcggcggagcccatattgccggggcggcacagccgaattcatcagacgcagaaagaacccgggcaatggaaaaaatcgaaaaagcatatgagctgatctcgaacgaatacgtggaaaatgtagataaagaaaagcttcttgaaggagcgattcaggggatgctgtctacattaaacgacccttattccgtttatatggacaagcagaccgctaagcagttttccgattctcttgattcttctttcgaagggatcggcgctgaagtcggtatgaaagacaataaaatcattatcgtatcaccgtttaagcaatctccggcagaaaaagcgggcctcaagccgaatgatgaaatcatcagtataaacggcgtgtcaatgaacgggaaagatataaacgaagccgtgctgaaaatcagaggaaaaaaaggatcgaaggtttctattaaaatacagcgtccgggtactgaaaaacagctgtcattccggattaaaagagcggaaatcccgcttgaaaccgtatttgcttcccgcaaagaatcaggcggtcatcatgtcggctacatcggcatatcgacattttccgagcataccgccgaggacttcgccgcggcgctgaaaaagcttgaaaaacaagggattgacggtctcgtccttgatgtaagggggaatcccggcggctaccttcaaagcgtcgaacaaattttaaagcatttcatcacaaaagacatgccgtatatccaaattgcggagcgtaacggcgataaaaaacaatatttctcaaccttaaaacataagaagccgtatcccgtcaatgtcattacggataaaggaagcgcctccgcttcagaaattcttgcgggcgcgttaaaagaagcgggacattatgacgttgtcggcgacacttctttcggtaaaggaacggttcagcaggccgtgcctatgggagacgggagcaacattaaattgacgctttacaaatggctgacaccgaagggcaattggattcacaaaaaaggcattgctccgacaatcgctgtgagccagccggattattttgcggcgggaccgcttcagctgaaacagccgcttcagcctgatatgaacagcgcggatgtcaagcacgcccaaatcctgctgaaaggcctaggcttcgacccgggcagagcggacggctatttcagcaaaacaatgaaaaaagccgttctggcgtttcaagaccggtacaagcttgataaaacagcggtcattgataaaaagacagcggaaaaaatgaatcagctgatgaatgaaaagaaatctgacgaaaaaaatgatttgcagctgcaaatggcgttaaaatcattatttgtaaaataaatgaaaaggaggcgttttttgcgtctcctgtttcttttgtcattcataaaaagtgaaccaaaagacatataattatgacggttttgacaagatattaaaaaaattttcacatttaaacatttataaaggacaaacattacccgatatttatagagaagagagactttatgccgatttaatatgtattcaaaatgaaacttttgaaagttgcctcagtcagttttagttcttacaataaaagaaggttctaatagagaacagttttagtttggcagctgcatttcagtatcgaaagcagaagtgtttgcggcgcttcagcacggcagctgtaatcacccgtgcttatctggataaaaaaatgggggttcacaattgaagagggcaagtattgtgcgtgaaaaaaaatattatgaattagtggaacaactaaaagacagaacaaaagacgtcacattttcatcaacaaaagcactaagtcttcttatgctgttcagcagatacctggtcaattacacaaatgttgaatgcgttcacgaaatcaatgaagagtgtgcgaagcattatttcacttacttaatgaaaaaccataaacgtttaggaatcaatctgacggatattaagcggtccatgcttctgatcagcggcgtgatcgaggtggaggttgaccactatctgaaagatttctctctctcaaatgtaacgttgtggatgacggaagagagatagacgtttgagatattcaagccaatgattatttggtagaatagaattaaaatgtttggcttgaggcggtgaaagcagtgtctgttcaatggggaattgaacttctgaaaagtatcggtctgttttttttgcacccgatgttctggttttttatcatcataagtctcgcatgcggatatttgcggatcaaacgtgaacgccatacgtttcatacaaagatcgcggatatgtatgacgagcttatctttacatacataaaaggacttataccgggtattcttctctccatattattttttggacttggaatttcgattccattcggtcttctcggcataatcgcggctgtgactgctttgctttcgctgacgttccgtatgaattggctgtcctcagcttatattgtcagcgccggcatgttcattgcgtttatccttcagtatacccacacagtgccgtttgcggatcggtttccgcaggcattcggcgtgaattgggcatcggcggccgtgtttatgggccttttgattatcacggagggagcggctgcctgccgttcagcgcatctgaaaacatctccggcgcttgtcgtcagcagcagaggcctgcccatcggccgacaattggcgaatcgcgcatggctgcttccgcttttcttattggtgccgggcagcgggcttgagtcacacctttcttggtggcctgtctttaccgtaccgggcggctctttccatttgatctggattccttatatcgccggcttcggacagcgtgtgcaggggtcacttccggaagtcagcataaggataacggcgaaacgtgtcatgattctcggggttatcgtgaccgcattcggggcagctgccctttggtggactccgcttgccggagctgccgcttgtattgcggtgctcggacgcctgtttttatcattgagacagcggctgaacgataacgcggctccgttttatttctctaagcgggatcagggcttaatggtgctcggcatcattccgaatacacccgcggacgatcttgagctgaagatcggtgagattattacgaaagtaaacggcatccccgtgaaacatgtatcggatttttatgaagcacttcaaaaaaaccgcgcatttgtaaaaatggagatcatcggcctgaacggtgagatccgttttgatcagcgcgcgtcctatgaaggcgaacatcatgaattaggtattttattcgtgcaggatgaacacgagcacgaagaaatgacagcattataatgtgatttttcataattattcggaatagtttcaagaactcctaaactagatttcaaaatcagttagaaagtaaaacagctaagaaaattatattttcttagctgttttattttgaaataataaaaaaataaatgaaggagaggtatggcttattggaaaggttattgctaactccaaaacctttagaagatgaatctttagcaggatatatattaagaataactgattataatggttatgttggatagggggagtacattataaaaaagcttttacttaagagattaccgttgatttcacttggagttatagcttacatactgacaaaatacgcgcagaaccatcaggattgggcggaaaaatacagtaggtctgtatatccgttattgtcaaaaatagtaggatttgtaccttcttgggtcaagttttctgttagtgaatggctcgtcgtgttggttgtgttactttttctattttatatcgtttattatgtgcgcaaggttatcatgagtaaaggtgtacgtaggatggtagtttatcgtggtgctctaggaatagttacgatctgtagcgtgatatatttttgttatactattttgggtggaataaactattacagatattcttttttgtcttataccgaatataaagaagagaactacagcaaggaggaactggtcaaattgagtaagtcgcttgccgttgaaatggaattggcaagggaaaagttagcggacactgatcttttggctcaagtaccagaggtttttgattattatgcacaacacgcagtgttctcgatgcaaatgttatcaaaggaatatcctattttggagcattctttatactcaacaccaaaaccagttgtgatgtcaaagctaatgtcgcatgcagggataaatggcatctttgtcccttttacttatgaatccaatatcaatgttaatgtgcccgttttcttggtgcctgctactatggcacatgaattggcacatcagagtggtttcatgcatgaggatgaggcaaattttatagcatatctggcatgtaagcagcaggatgatccaatgatactttacagtggtttttttctagcatttgtttattctatatctgagctaaagaaagtggatccagatcaggcgtctgatataatgtccagtctgtccaaggcggtgcagcatgatatagaacaaaatgagcagtaccgggataagtatgagggtgttatttcaagtatttcaagaaatgtaaatgatgtatatctgaaggcaaataatcagacagacggtttgaatagctatagtgatatggtgaatttgttgctggcagagcagcgagatagagaagtacaattaaatgtatcttgaatacttataggtttatatagtaatgatagtgggctcaagttgaacataggagtgagtgaaataaataaaataaaagacggcggccgggctttttacggccggattacgatgtcagcgccgaacttgatcggaactctcagccatttacattccccttttctcttgtaaatcaaaagattcttatagagcaaacggcattgcggtgacactttgagagagaaaatgaagaaggaaaactagaaaaggttccggaaagctgatgcttacggaacctttttcgttatgccgaatggctttttttcgtctgaacggtttccccggacttaattccaagcgatacgaacaagccgatcacagaaactccgatcaatatgataaacagaatatgaaacccggagattaaaccgatcagtgctgaagaaataatgcttccgaaataacggaaggtggagaaaatcccggatgcgatgccggacatgcccggttctaccgtcgcaagagaagatacctgcatgctcgtcagccccgcacctgacgcgatgcctcctacaataagcgatgccataagaaacggaacggaatgggaataaaccaaaagcagaaataagagattggctgcggccatcagcccgaaggacagaaaaatcattcttcgcgcgccccatttctgatgcagctgagctccgccccagttgctggcggacatgaaaacagaaaagactgacagcgccatgccgctgtgcgacgtgttcatgctgaagtggccggtcataaagagcggcataatcaataacacggcgtacatcattaaattgcttaacagaaccgacagattggcgctcgtaaaggtcgtgtttttaaacaggtcaaaatcaataatcggatgtttcgtgcgcagttcccgcctgaaaaatagcggaaccaatacgagaatgagcagcgcgtacacccaatagcccaaagagctttcatttttcgtcagaagaataatagatacaatgcttccggcaagcaaaacggacccgatgatatcaagcggagcgtcagacgtttcttctttatatttaggaaacatcattaatgccgtcacgagtgcgatcgcaagaaacggaatgttgacccaaaagatcgaatgccagctgaagctctcaattaatagagagccgataaacggaccgagagctgcgcccagcccggcgccgaggccgaaaaagccgaatactttcggaagccgtttttcagacacgacatggcggatgatggcgatgctgtttggcgtaagcaaagcgccgccggcagcctgaagcgcccggaagaaaatcaataagaaaagacttggcgagagggcgcaccccaatgatgcgatgagaaaaaggccgacgccccataaatacatttttttgtttccgtacatatcaccgagtttgccggcaatgggctgtgtcacggccatcacgattaaatacacggtcactacccatgtgatgctggcaattgattcgctgaatgagcgggaaatggatgaaagggcgactgcgatcatcgtagaattgatgggaacgagtatggctcccagcaaaagcgaaacgatcagcgcccattctttctttgaacccatccttcatcctccttggagccggaaaatgaccggccggtaatgcctttcatgaaaatctcagtgctgtgtttcagcatcgtttcctcagagagagtaatgactcttttccccagctgcagccggtgtataaaataaccgaaaatcatcgtcataaagacgtctgcattagcttcttcgctgccggggcttatcatatttttctttgtcagctccttaaagtaaacgattaaatgctttttcacggattgcggatatacgacaatatcctgcaggacgtcttcgaatagttccggttcgcgcaggcagatgcggaacacttcttttttttgttccaattgctgcagaagggtcgtggcgaaatgaagaagatcctcatacagatcgccttccgccttggtgatcatgctttccggaaccggcgcctgctgttcaatcatggctttcattaatccttgtttgtttttaaaattacggaaaatcgttgcttcgcttacttttgctttttctgcgatttcctttgttgtcgctgcgcggtatcctttttggatgatcagattcatcgcggcgtcaataattctcttgttcgtcgttctcaacatgtttcacctcgcgtaaatactggcaggacaagtatacacccgccctgcccgtcaataaagagggaaacctagcatgaagcgcgtttgacaattgtaatcttgccgtttgtcccgtctaccgtgacgatatctccgtcgttgagcctgtcagtcgcggcacgtgtgccgagaacggccgggagcccgtattctctcgcgatgatcgccgcatgtgacaggatgccgcccgtgtccgtaatgacggcctttgcatcctggaacagactggtccaaagcggtgtcgtcattttgcagacaagcacgtctcctgttgaaaaacgggaaaattcacttgcgtcacgaatgactttcaccggtccgcttgcgattccgcttgacgctgcaagtccgtaaatttgatgttcagtgtttttttcatcttctgtgatggagccggtaatctgttcagccgttttcagctgttccgaagtcggagtcccgagataagcgggggcttcaagcaattgatattgcttgaagagccgttttcgttcagcggctttttcctgcatcggaaccggcgacgccagcgctttctcgacttcatcgctgtataagtaccacatatcctcccgatcatcaattacgccttgtttttgaagcagctcgccgattttcagaaggcaaaggcgcgctttggcgtccagcatcgcatcaatataaaaatggtgatcatctttgatgacggatgaagacaatgtccactgataatagcggtcaaacgtctcccggaagccgtcatcttcaattctatccataaagtcggcgtagagctgttttcgtttttctatcgttttatgaaactcactgtcaaaatcgtatccgtttcggacatagttctgaatgttggccaaagcgaaataagggttttccgcccaagtttcttcaatgagatcatgacttttcacggatctccagccgtattcctgtaaaaattcgccgacttgttcaagaaagcgttttccctcatttgattgcagaagcgtctgatgcagctcatcggcatgagaaaccgtaaagacgcgccgcagctcagggctgtcttttacttgtccggaaagcagccagagctgtctgtcggtctccaatgacttattcatgacgccggccagcatttcatacagaagggaggtgttttctttctcaacctgtccgtacatagattccagtatcatgtttaacgcaacctgcggaaagacaatattgaaatgttctgcgtatccttttaaatagaagtcttgcaggtttcggaacgcatcaatggcagtctccggcgtatggtctgtatgcgccagttcgtccagcttttgataaaaaggcagaaaggtttcctgaataatattgtacatgcggtcagccaagacggggaaaagcgcttctaactgttctgcgggcagcttgtcgtccgtcttatgctgtctggaaaaaacatggccctgatgaagtttgacacgctcaatctcgatgcccatcacagggaaggccttcgtgctctctttgagaccgtattccaaagccggcacaatgagtgaagcgaataacgggctgacgggaccttctatattggactccatattgagccaaaaatctttctgatcccggggcgtcatgataaattcccgttcttcgtctgccgctttctgatcctgcgcgatcgttgtaatcggtctggcctgaagcagatagagcttattttcggcaaatccgaattcgagatccacgggataaccgtacagttcctccgtctttatcgtcagcatggcaagctctttgacgctctcgtcatcaaggcagaagcggtttctcatgtcagcggacgtctctttttccgtcacgccttcgtctttagagacgatatacatttcttttaagccgatttctttttcaatctgaaatgtgtctttattgacgataaatgtgtcgggcgtcacgctgccggagacgattgcttctccgaggccgtagctcgcgctgatcatcagttctccgtcatcatgtgtgacggggttgcggctgaaaatgactcctgaaacctcggaattgatcaaaccttgcacgacaacgcccattaacggttctgcggtgtcattgttcattttctctttataaccgctgacccgcgccgagaagaaggaagcccagcactctttcacttttccgagaaactcttcttcagttttgatatttaaataggtttcgtactgtcccgcgaaagaagcgccttcaagatcttcggacgcggaggaggaacgtacggcgacagaggcgtatgattctctcaattcataaaacgatgcggtcagctcctcccgaagctcttttgaaaacgtgccgttcataatggcgcgctccagctgttcctgatctgcttgaagcccgttgtcttccataaaacgtgtcagggcattcgtctgaatgataaaaccgccgggaacgggcagcccgtttttcgtcagtttaatcaggttcattccttttgctcctgcagagcggctcgattcttccgctttttgaaatcgcactgaatacatgcggtatgaccccctttttttcttcatccaagaaaatgatagtaaacactatcattacattgtaaagagggaggaagaaactgtcaaagatacaaagacctaaaccttctcatcctttcggctgaagaaaggtaattcgattcatctggttaatggttcaatggatttatattcacattttctttgacagatgattgaagactgccgaaaaagggtattgtgatagcaggggaacgattgtccgattcttcattttttactataatcagatgagatgaagaattcccgaggagggtttttgtgattacaaaagccgtttttgcattatgtttcccttttatgctggtcgtcctttttacgcgcgtcacgtttaaccactatgtggcgatcgctctcacagccgcactgcttttcgcatcctatttaaagggttacaccgaaacgtattttatcgttggattggatgtcgtatcgctggtggccggagggctgtacatggccaaaaaagaagcagacaaaaagaaagacaatgcctgacatggtgaatatgaaatagaatgcctgcttttacgccataaaagcaggttttttatacaaaaattgacttggtaaaaataaaccatcgaactttagttcgtatttttagtgattttgcccgtcattgtgttactatatcaataggaagatttcgtaaagaaacggaggcttttttgtgaaagatcgttttgagttagtctcgaaatatcagccccagggagatcagccgcaagcgattgagaagcttgtcaaaggcatacaggaaggcagaaaacaccagactctcctgggtgcgacagggacgggcaaaacctttaccgtgtccaatctgattaaagaagtgaacaaaccgacactggtcattgcccataacaaaacccttgccggacagctgtacagcgagtttaaggagtttttcccgaacaacgctgtcgagtattttgtcagctattacgattactatcagccggaggcgtacgtgcctcaaacggatacttttatagagaaagacgcaagcattaatgatgaaattgataaactgagacattccgcgacatcctctctgtttgaacggagagatgtcattattatcgcgagtgtgtcatgcatatacggcctcggttcgcctgaagaataccgggaaatggtcgtgtcgctcagaccggaaatggagattgagcggaacgagcttctgagaaagcttgtggatatccagtatgcccgcaatgatatcgactttcagcgcgggacgttccgcgtgcgcggagacgttgtggaaatcttcccggcttcccgtgacgaacattgtatcagagtggaatttttcggagacgaaattgagcggatcagagaggtcgacgctttgaccggagaaattctcggcgaccgtgaccatgtcgcgattttcccggcttcccacttcgtcacccgggcggaaaagatggaaaaagcgattctgaatattgaacaggagcttgaggagcgcttgaaagtgatgcgcgaaaacggcaagctccttgaagcgcagcggcttgagcagcggacgaggtatgatcttgaaatgatgcgggaaatgggtttttgctcagggatcgagaactattcaagacatttgacgctccgtcctcctggttctacgccgtatacgctgcttgattattttccggacgattttatgattgtcgttgatgaatcacatgtgacgattccgcaggtgcgcggcatgttcaacggtgaccaggcgagaaaacaggtgcttgtcgatcacgggttccgcctgccgtcagcgcttgacaaccgtccgctccgattcgaggaatttgaaaagcatatgcacaatatcgtgtacgtgtcggcgactccgggaccgtatgaaattgagcatacgccggaaatgatcgagcagatcatcagaccgacgggactcctcgatcccctcattgacgtccgtccgatcgaaggacagattgatgatctgatcggcgagattcaggcgaggattgaacggaatgaacgcgttctcgtgacgactttaacgaaaaaaatgtcagaggatctgaccgattatctcaaagaaatcggcatcaaggtcaattatctgcattccgagattaagacgcttgaacggattgaaatcatccgtgatctccgcctcggaaaacatgatgtgttaatcggcatcaacctgctgagggaagggcttgatattccggaagtgtcacttgtcgccattctcgatgcggataaagaaggcttcctccgttctgaacgttcgctgattcagacgatcggacgggcggccagaaacgcggaaggccgcgtcatcatgtatgccgataaaatcacgaattcgatggaaatcgcgattaatgaaacgaagcgccgccgggaacagcaggagcgctttaacgaaattcacggcattacgccgcaaacgatcaataaggaaatccgcgatgtgatccgcgcgacgcaggccgctgaggataaagaagaatataaaacaaaagccgcgcctaaactggcgaagatgacgaagaaagaacgccagaaagtcgttgagcaaatggagcacgaaatgaaagaagcggccagagcgcttgatttcgagcgggcggcagagcttcgtgatttactgttagagcttaaagcggaaggatgatgaacacatggcaattgaccggatcgaggtgaaaggcgcaagggcgcacaatttaaaaaacattgatgtaacgattccccgggatcagctcgtcgtcgtgacggggctgtccggatcgggaaaatcatcccttgcctttgacaccatttacgcggaaggacagaggcggtatgttgaatcgctttctgcctatgcgcgccaatttttagggcagatggataagccggacgttgatgcgatcgaagggctttctccggcgatcagcattgatcagaaaacgacaagccgcaatccgcggtcaaccgtcggaacggtaacggagatttatgattatctccggctcttatacgcgagagtcgggaagccgcactgcccggagcacggcattgaaattacgtcgcaaacgatcgaacagatggttgaccggattcttgaatatccggagcggacgaagcttcaagtgcttgcgccgatcatctcaggcagaaaaggcgcccatgtcaaagtgcttgaccaaatcagaaagcaaggttacgtaagggtgcggattgacggagaaatggccgagctttccgacgatattgaacttgaaaaaaacaaaaagcattccattgaagtggtcattgaccggattgtcgtcaaggaaggggttgccgcccggctttccgactcactggaaaccgcgctccgcttaggggaaggccgtgtcatgatagatgtcatcggtcaggaagagctgatgttcagcgagcatcacgcctgtccgctgtgcggtttttctatcggggagcttgaaccccggctgttttcgtttaacagcccgttcggcgcctgcccgacttgtgacggtctcggtttgaagctggaagtggaccctgagctcgtcattcccaatcctgaactgtcattaaaggaacacgccatcgcgccgtggacgccgatcagttcacaatattatccgcagctgcttcaggcggtctgccgccattacggcattgatatggagactccggtcaaagacctgccgaagcatcagcttgataaagtgctgtacggcagcggcaatgaacggatctactttaaatacgagaatgatttcggacaagtgcgcgaaaatgaaattgaatttgaaggtgtgctgcgcaatattgagagacggtataaagagacaagctccgattatatccgtgaacagatggagcagtacatgtcacagaagccgtgcccgacgtgcaaaggctaccggctgaagaaagaagcgcttgccgttttggtcaacgggcgccacatcggcaccattaccgagctttccgtcggcgatgcgctggaatttttcaaaaacctgacgctgtctgagaaagatatgcagattgccgatttaattttaagagagattgtggagcgtctcagctttttagataaagtcggtcttgattacctgacgctgagcagggcggcgggaacgctgtcaggcggagaagcccagcgtatcaggcttgcgacgcagatcggctcccgtttgtcaggcgtcctgtacattcttgatgagccgtccatcggccttcaccagcgtgacaatgaccgtctgatcagcgcgctgaaaaacatgagggatctcggcaatacactgattgtcgtggagcatgatgaagatacgatgatggctgccgattacttgatagatatcggcccgggcgccggcattcacggcggccgcgtcatatcggcggggacgcctgaagaagtgatgaatgatgcggattctctgaccggacgttatttgtcaggggctcaattcatcccgatgcctccggagagaagaaagcctgacggccggttcattgaaatcaaaggcgcttcagaaaacaacctgaaaaaagcgaacgccaaattcccgctcggcacttttacggcggtgacaggtgtgtccggttcgggaaaaagcacgcttgtgaatgaaattctgcataaggcgcttgcgcaaaagcttcataaagccaaagcgaaaccgggaagccataaagaaatcaaaggccttgaccatcttgataaggtgatcgacatcgaccaggcgccgatcggccggacaccgagatcaaatccggcaacttacacgggtgtgtttgatgatatccgcgatgtattcgcgcagacaaatgaagcaaaggtgcgcggctataaaaaaggccggttcagttttaatgtaaaaggcgggcgctgtgaggcctgccgcggcgacggcatcatcaaaattgagatgcacttccttcctgacgtgtacgttccgtgtgaagtgtgccacggcaaacgttacaaccgggagacgcttgaggtcacatacaaaggaaaaagcatttccgacgttctggatatgacggtggaagatgctctgtctttctttgaaaatatcccgaaaattaaacgcaagcttcaaacgcttgctgatgtcggacttgggtatgtgacgctcggccagccggcgacgacgctgtcaggcggagaagcgcagcgcgtcaagctagcttccgagctgcataagcgttccaccggccggacgctgtatattctggacgaaccgacaacagggctccacgttgatgatatcgcaaggcttttggttgtgcttcaaagactcgtcgataacggtgataccgttttggtcattgaacacaatctcgatatcattaaaacggcggactacatcgtcgatctgggacctgaaggcggagcgggcggcggcacgatcgtagcctccggaacgcctgaagaagttgtcgaagtgaaagaatcatatacgggccgctatctgaaaccggtaatggaacgcgataaaaaacggatgaaaacattgctggccgaaaaagaaacggcagccacgtaatagatcaataaaaacagcccaaaactcatcggttttgggctgttgttgttacaggctttttttctgttggggaagctgtctgcttaaatgcattaagtcctgcagaatatgggtgctgctgctgtccagcagcacttttatatattggatatcatgggaaatgggaagaggggctgctttgatctgttctaattcagccagcatttcgctgttcattcttttctgttcgcgaattaaatttcgaagactctcttccgttacttgggcgttttcgggatctttctccatttgtatgtcctccttgcatacggtcaggctttgttacatattgtaatcggttcggggaaaagattctatagtgaaatctctgaaaccaaaaattacgtataacgaagcatgtccttagcatgaaaatgaaacccgctcattcgtcatacgtatgtataaggaatggttttttatatcatggcacagggagtgtttttattgaaccgaaatcaagcgattatcgcatcaatctgttatttcagcgtgtttctcgcgccgctcattcttccgattgtggcttactttgtcgtcgatgaaaaagagacgaagcggcatgccatgcgcgctctgatttcccatatcattccgtttgcgggcttgctgattgtgaccgccggtgttgtcggcggattgattacggcccagggggagagtatggtgcccgtttttgttatgataacaggagcagctgtttattttctgatcctcatcggaatggtcatttggaatatcgtgcagggaattaaggtgttacgccaggtgtaagaaaagtcgggggaggagttttgtatgaaacaggagaaagaacggattttaaagcttgtggaagacggcatgctgacggcgcaggaagcactgacgctcattgaaaaactggatcatgaatataaagaaaaagaagatcagatcaccgcattatctgcggaggttcaggaacctgcggaagatttcgaaagcggtgcaaaaggaagccaaaagccgtcgctcggggcgaagctgttcgactggattgattctgccgtcaaaaaagtgaaggaagcggatcttgatctgaatttcggccacgcacacgaagtgcagcatatttttcaatttaaagacagtgaattctcggccattgatatgcagattgcaaacggcagcgtcaatatcgtgccgtgggcggatgaagatatcagagcggagtgccaggcgaaagtgtaccgggcggacagtcaggaggcggcgcgcaccgcatttcttcagcatattgagtgtgaagtgaagggcaataagttttttgtccgcacggaaaagaaaacgatgaaaaccaatgttacgctttatgttcctcagaaagagtacgataagataagagtgaagctgtttaacggaccgatcagaggggaacatttacatgtaaaagaattctcggcgaaaacgacaaacggcgttctgtcattctctcatttgacggctgagaaagcgtcggcggaaacggctaacggacaaatcaagctggccggacatcaatgcggcgcgattgaagcggaaacgatcaacggcttgattgatttgcgcggatcgagtgaatccattgacgttcaaagctttaacggcaatatcatgcttaccgtgacagcgccgcactgccgctccatctacacgaaaacgacgaccggaaacgtggagatcgccctgcctgatgattcggcggtgaaagcggagctcaaaagcaatctcggctctctcagccatgagctgattgatgcggaaattttaaaggaaaagaatgataccattcaaaaagaactgatgctggcatcaaatcaaggccatgatcagcatctctcgattttctcagaatcgttaacaggagccattaagctcaagcatactcagaggtgattggatgaaaagactttaccgttcagaaaaaaaccgtaaaatcgccggcgtcgtcggcggtttggcggagtacatcaatatggatgcgtcgcttttgcgcattatcaccgttgtattagcgcttgtcacgagcggaatcgtgccgattgtatatattatctggtgttttgttgtacctttagaaggagatttgaaataaatgatcaaatgggcagtcagcattttagtaaatgctttattattaatcgttatcgcgggatattttgattccgtccatatcagcagtatcggagcggctgtcatcgccagtgtgattctttctgtgttaaatgtgctgatcaaaccgatcatcgtcatattgacattgcctgtcacggttgtgaccctcggcctctttctgtttgtcatcaacgccattacgttaatgatgaccgcagccttgatgggagacagctttcagattgacgggttcggcaccgccatttgggcatccgtcgtgctgtccgttttccacttgctgatccaaaaaggcatattggagccgcttagaaaaggataaaaaacaagctgtcccgagagggcagcttttttatgtgcggtttacataagcggcagcctcctgacgcaacataatgcatagggaggtaatgagatgaaacttgtgatgacgctcttttttctgattggtttgctttgtgtgagtccttctgcggatgcggcgcgcaaagaatcggcaatccccgtgaatcagcaggaattcggacagccgcctcattacataccgcttctggagaatcctccccaaatcgaagtaaaggcggaaatgaaaagaaacctgttcatacaggctcatgtacggaatgctgactatcaagcgttttcggcgtttcttttttataaacaaagcaatgagctggggtttaagatggtgccgatggagcccgcgccaggcgcaatccggctttttacggcccaggtttcaaaacgggatatctggaatggagaattggaatattacctcgttttcaccaacggcagacagcgggcggaatcggagaaaaagcggctgaagctggacggctatcaagccgatttgaatcatattcccgagctgatgattacggagcttgcggttgatacgaaaaatgaagatggcgctgatgcctatgaatttatcgaggtgtataacacgacggacaggcccattcattttaaagactatcatatccgctaccgctatccgaaggaagggccggaatcagatatgatatggaggccgaaagaggataccgtcattccgtcaggcgggacttacgtgttttggctgagacgcgccgcatcagaactgacgatagatgatttcaaccgctattacgggacacgtctgaaggaaggagaacatctcgccgtcatcgaagggacagacggaatgtccaacggccgcccgcgtacggtcgtgctgtcggcaaataccggcaaggatatcgcctcagcgcaataccggaaacacgctttccgccggctgacttctttgctgtacaaatatccgctgaacggaacgggagaattgctgaagatctccacgagcgagcataagccgtcaccgggctccgtttttcaggcgcagattccgcagcagaaaagggtgatcaaacccgacaaggaaaaaccggtcatcgaagaccttacagacagaaagcccgtccggcccgctgaaagcattgaattaaaggctgacataaaagacaaaaaccttgtcaaaacagccgcgttttattaccggaccaatgagaaaaaaccattcaaacgaattctggccgaaaaagaccgcaacgacagcttataccatcacattctttattccccggaactgctcggccaggatcagcttgagtattatatcgcagccagtgatggagaaaatgaagcaaaaacgcccgtcaagatgattgacattgaacagacgagcaaatcacacggactcagaatgaatgttgaaccggaagatacgatatccggcacctatctgctcaaagcgacttccgacgtcagcgccgataagatcaagctgtggattgacggcaagcggcaggagacccggccggcgctggaaaaagaggtctatttcgccttcgatgcccggaaaacgaatctttattttcaaaacaccgtcatgatggaaaacgaggtgctgcacatttttgacgatccgtctcaccgctacagaacgcactcggttctgcttccggaacgtctgctgctaaaagggggcaaaacacagaaagtatccatccgttcgggctcaaaggtttctccgtatgacacgggagagaatcgggatgattttgtcgtgaaacatgcccgtctggtgctttcggacggaacggtgatcaaagacgggaagacggacccgtccgagcagctgtttatcggtgacggcaagcgggcgaatcagcagaagaccttctcattcagcctgccggatcatttgtttacgtcacggctgctgccgtggaacacggcgaagctttcggaaggctatcaccatatttttgtcagtgacggtgaggagcagctgagccaatctgtgagggtggacaattcggggccgaagattgtcccgggtattaaagaaggcgcggcgctgaaaggtaatgttgagctgaatgcggacatccgtgataaatggagcaaagtggaagaggtgaaagcgtttttggacggagaaagcattacgctcccgcatcacacgtcatcagccgatctcaagcccggaaagcacacccttactatcattgcggcagaccttgccggaaatgaaacaacgtccgtccgcaccttccatatcaaacgggaggagccgaaccagccggagcttgccggtcaaaaaatcggcgcccgcaaagcaaagctgtccgtccgggtaaaagacccgacgaaggatgacatgaatgtatcattttatcgcggcttccgttataccgcgcggaatccgggcagcgtgaaagtgtataaacacgcctcattaacggaaccgccgaagggcataaaagaaaatgaaatgccgtttaccctgccggaaatgaaccgtatctcggcaaatgacggaaaaaccgtttcggcggaaagtgtggagcgttttccttatcaccggttcgaagtctccgttgacccgtctatcgacgaaacggatctggccgaggcggtctggaaaggaagctctctgcccggccgaaaggtaaccatgtatatttggaattaccggacaagccgctggcaggaggcggacagcgtccttgccaaagataaaaagccgtttacattaaaagccgccgtttccgcagcggatgtggtgaagaactcaaaaatgaatgtcatcgtgcaggatcaaataccggcgaaaggcaattacacgtttgtctggatgtcggatacacagtattacgcacaagggcacccgcacatttttgacaaaatgacggagtggatcaaagaaaataaggaaaagcacaatattaaatatgtctttcataccggtgatattgtcgatgattcaatggtgatgaaacagtggaaaaacgccgatcactccatgcggacgcttgacaaggcggggattccgtacggagtgcttgccggcaatcacgacgtcggccataaagacggcacataccgaaccttcggggatttcttcgggagccgccggtttgaacagaacatgcattacggcggatcatacaaaaataaccgcgggcattatgatctgctgtcggcaagcgggaacgattttattatgatttatatgggctggggcattacggaacaagagattgactggatcaatcaagtgctgaagaggtatccggaccgaaccgccatcttatgctttcatgagtacttgcttgtgagcggaaatcgaagcccgatcggggagacgatctatcgaaaagtcgtcaagccgaatcgcaatgtggcgatggtattaagcggccattaccataacgccatgaaaaaaaccgatgcgcttgacgatgacggagacggaaaaccggaccgcctcgtccaccaaattctgaccgactaccaggacggtccggaaggggggcagggctttatgcgcataatgcaatttgatcaggccgccaatcaggttcacatgttctcctactcgccgtacacggatgacatcaattactatgacaccgatctgttcgctgataaagacgaattctcagcagaaatggatttacagccgaagaggaaaagggtagcgactgattattttgaatgcaacgtttatacgaacgaactgctcggtcataaaaaacacgtaaaaagcggaaaaaccgcaaattgggtctgggacggcctgcagcctgattccgtttattactggtacaccgtcgtgaaggacccgtacaacggcaaaacaatatcaccgctgtggatgttcaaaacgggaaatacgccgtatcacccggctccggatcagtttgatttcaggcatgcctcaaacccatagcaaaaacatacacctgccgatcggtcagaagaaaatctgacggtcagcaggtttttttctgtaacatgcatggcggtaagtgtttttgacttttttatgtcccttttctatactaaaatcgattggttttcgtaatatgcaggaggaaacataatgaacagtaaaaccgggacaaaagaaagaattattcaaacctctgcatatctttttcagattcagggataccatgcgactggtttgaatcaaattataaaagagagcggagcacccagagggtcagtgtatcatcactttccaaacggaaaagaagaactcgccattgcggcgatcaaatatacgggaagatgcgttgaaaagcagatacagaatagtatgtctcaatccgcggaccctgtagaagcgattcagcactttattcatgtaacggctgaacagtttaatgatccgcagaatattgagggcgtgccggttggattgctggcgggtgagaccgctctgatcaatgaaacgttaagatgcacatgtgttgaggtgttcaagaagtggacggatgtgtttgcggcaaaatttcttgagcatgggtttgaacaagaggaagcggagaagcttgggatgacaatcaactcgatgattgaaggcgcaatcatgttttcattggctcataaaaacaaagaaccgctgctgctgatttcaaagcaggttccgtatattgtccaaaacagaggatagcattttattactcttttctttataaaaatagataccggaaccccagcctcttcgttttgacagagtcatagagaacattcaccggcttgatttgaaaatggcagatcaaaaaaacatctccaacccgtaacggttggagatgtttcatttcaccctgtccatataatgcacgaatgtgtagcggtcgcctctgtaggcggatttgacgtgctcaaaggcagtgccgtcctgcagataagtggtccgcttgatatagaggacgggggcgccgggctggataccgagcagctcagcttcttcctcggaagcggttcccggttcaagctcttgttttgcccgtgagatcggcatctgattgtacgcttcaatatgctcatacatggatgattgaaaatgggaggcatccaattttcccgccttgtcaaacgggatatacgatgcctcaatcgccatcgggatatcatttgccagccggacgcggatgattttatgaagcgttgccggatagccgcaccccaggatagaagataattcttccgtcgcctgaatcagctggtattcggcaagtctactccccggcttcatgccccggcttctcatatcttcggtgaagcttgtcagcccttgaagcggctgttccatcttcagtttgctgacgaacgttccccggcctttctgtctgtataaaaatccttcattcaccaaattggaaagcgcctggcgcaccgtcatgcggctgatgccgaattgttcggcgtattcccgctccgacggaagcagcgcatccgctttcagctcgccgtttttgatttgtgtttttaattgttccataatctgaaagtaaatcggaatcggagattgtttatcaatctgcataggtcaaatcctttcaatcgccgcccgcagccttttcatcaatcaagaccgtcacatccggatgcgcgtgcagggcggaggcggggaatgcttcgctgacgcgcccgtccagaagctgcttcaccgcttgggccttgctttttccggatgccatgatcagaatccgtttgccggacaaaatcgtcccgatccccattgtcagggctttttcagggacttgatcaattgacggaaagtaccgcgcattcgcctgtcttgtctcttcattcagctcaacaacatgggttcgggattcaaatggcgtcccgggttcattaaagccgatatggccgttgtgtccgatgcctaaaagctgtatatccgctccgccgagtgtttgaatcaatcggtcatagcgcccgcattcggcatcaagatcgtctgcccgtccgtcagggagaaagtggcggtcctttcggctgtcgatatgtgcaaaaaaatgtgtattcatataataatgatagctgtttttgtcctcgggagaaagcccggcgtattcatcaaggttgatcgtcgtgacattccggaacgacaagccttctgagcggtgcatccgcacaagttctttgtatacgccttcaggagtgcctcccgtcgcaaggccgagaacggcatccggcttttgtttcactgtttcagcgataatcgctgcggctttttcacttaattcttcataatgtctgcatgtgataacgttcatgtccaatcagcctcccttgagatatatgcggtgtttccgcggcaaatcgtggccagcacgccgcactgtccgtccgtcagaacaacgtcggcgtcttttccttcggcgatgcttcctttacggtcgaatatgccgaggcggcgggccgcatttgccgatgtcatatttgctatatccggccatgagcagtttgtaaacctgcgcatgagcgccgcgccttcattcatttttaaaatggaaccggccagcgtcccgtcagagagaagcgccgtgtccccgcgaacggtgactttttgtccgccgaattcgtattctccgtccttaagcccttttgcccgcatggagtctgtaatcatgatcaggttttggcttcctttcgccaaataggcaagcttaacagccagaggatgagaatgaatgccgtcagtgatcagctccgccgtgatgcggccgcaggcgagagccgtaccgatgccccccggctcacggtgatgaaaggagctcatggcgttaaagaggtgcgtcatatgcaccgccccggcatccgccgctttttgtaaaagctcggctcctgcgtctgtgtgtcccattgaggggatgatgttttggttttttaaataacggatcaggctgaaatcaggatcttcttccggcgcaagcgtcacgattttgatcagccctcccgagagccgctcccatttctgaaagagcccggcatcagcaggagtaatccattgtttcggctgtgctcccgcctttttcggagagacaaacggtccttctaaatgaatgccgatcaactcagcgcctttttgggtctccggtgaggaatacgcccattttttggcgttgatgagcgctttttcaatgttttcgtgctgctgtgtgatcgttgtcgctaaaaaagcggttgttccttcttcgggcagccgggcggacagtgtatcaagagccgcaacatcggcatccatcgtatccgcgccgtatccgccgtgaatatggatatcaatcattccgggaagcgcatacgagccctcgggcgccttccattccttctcatacgtttcttgcggccttgtttttcccgcgtaagaaatgatgccgtcctttataccgagaaaaccgtttcggatgatttctttttctgttacgatgtccgcaccgctgattaacaagctttcagccactttaaaacacgcctttctggttagttgttagttttattttactccttttcagactagttatctagaccagttatgccggaattgtataaatctgttttggttcagacggtaaagtgataaaatataactgttcaaagctcggaacatcccagaacaggaggaacatatcttggcaaaggttcggaccaaagacgtaatggaacagttccatttagaattgatcagcggagaagaagggattaaccgcccgattacgatgagtgatttatcacggcccggtattgaaatcgccggttattttacatattacccgagagaacgggtgcagcttttaggaaaaacggagctgtcatttttcgatcagcttcccgaggaagataagaaacagcggatgaaatcgctgtgcaccgatgtgacgccggctatcatactttccagagatatgccgatcccgccggagcttgtagaagcttccgagcaaaacggcgtgcctgtgctcagatcccctctgaaaacaaccaggctgtcaagcaggctgacgaattttcttgaaagccgtctcgcgccgacaacggccattcacggcgtgcttgtggatatatacggcgtcggcgtgctcattacgggaaaaagcggcgtcggtaaaagtgaaacggcgctggagcttgtcaaacgaggccatcgtcttgtcgcggatgactgcgttgaaatccggcaggaggatcaggatacccttgtcgggaacgcgcctgatctgattgagcatctgctcgaaatcagggggctcggcattataaatgtcatgacgctgttcggggcgggcgccgtcagaagcaataaaagaattacaatcgtcatggaccttgagctttgggagcaaggaaagcaatacgaccgtctcggacttgaagaagaaaaaatgaaaatcattgatacggaaattacaaaactgaccattcccgtccgcccggggcggaatctcgccgttattatcgaagttgcggcgatgaacttcagattgaagcggatgggcttaaatgctgccgaacaattcacgaataagctggcggatgtcattgaggacggcgaacaagacgaataggagttggcaataatatgaatgaagctggaacaccgatcaatccgattgccttgcagctcgggcctttatccgtgcactggtacggcatcattatcggcgcgggcgcgttattagggctttggatggccatgagggagagtgaaaagcgggggctgaaaaaggacatttttattgatcttgttcttttcgccatcccgatcgcaatcatttgcgcaagggcatattatgtgcttttcgagtggagctattactcggaacaccccggggaaatcattaaaacttggaaaggcggcattgcgattcacggcggattaatcggcgcgatcgcaacgggaattgtcttttcaaaagtaagaggcatctcattctggaagctggcggatattgccgcgccgagtattctgctcggccaggccatcggacgctgggggaactttatcaaccaggaggctcacggtggagcggtcagccggtcatttttggaaagtctgcatcttccggatttcatcattaatcagatgtacatagacggacaatattatcacccgacgtttttgtatgaatcgctgtggagttttgcgggcgtcgtgattctgcttctgctccgccgcgtgaacctgcgcaggggcaatctgtttttgacgtatgtgatctggtattcaatcggcagatactttattgagggaatgcggacggacagcctgatgcttacgagccagcttcggatcgcgcaggtcatttccattgtgctgattatacttgcgattattttaatgattttcagacgcatgaaggggtatgccgataagcggtatgctgacacggactgacgactgaaatcggaaaggacataagatgactgataaacatgtaaccgccattttattcgatctcgacggcacgctgattgacacgaatgaactgattatcgcttcttaccttcatacgcttgatcattattgcccggggcagtttaaaagggaagatgtacttccgtttatcggcccgcctctgtacgaaacgttttcaggcattaatgccgaaaagtgcgatgacatgatcagcatgtacagagcattcaaccataaaaagcacgatgagctcgtcacggagtacgaaacggtttatgaaacgctggatgaattgaaaaaagcgggctatcagcttggtattgtcactactaagctgagggatacagtcaatatgggattgaagctgacaggcatcggggcgtttttcgatactgtcgtcacgcttgatgatgtaaagcacccgaagcctgaccccgagcctgtgcggcttgcgctcagccggcttgggtgcgatccgtcggaagccatcatggtcggtgacaattatcacgacgtcatggcgggaaaaaacgccggcacgaaaacagccggcgtcgcgtggacgattaaaggcgcacagacgctttccgcctatgaacccgattatatgctcgagaaaatgagtgatttattgcacatcaccggagtgaagtaatccgtgagaaaaacagaccgccatccggttgcaggtgcaaattcattgtggcatgtttatcagacggttcccttcctgaaggtgatgaaaaatttcatcatcattcagattgcaaggtatacgccgtttttaagcgtgaaaaactggctgtaccgaacctttttgaaaatgaatgtcggaaaacagacgtcattcgcgctgatggtgatgccggatatcatgtttcccgaaaaaatcactgtcggaaaaaacagcattatcggctacaatacgacgattttggctcatgaatatttaatacgtgagtaccggaccggttttgtcacaatcggtgacgaggtgatgatcggggcaaacacaaccattctgcccggcgtcaccatcgggagcggagccgttgtatcagccggcacgctggtgcacaaagatgtccccgccggggcgtttgtcggaggaaatccgatgcaggtgatttatacgcacgaagaaatgaaaaaacgaatggaaaaccccgcagattaacgtcagcggggttttttatgacttgatcacaatggcctggctgcccatctgcttccaggctttttcaaagtcagaccggtctgtttttctgtttttatagccgtaaggatcattaacgtatacataatcgtgatcataaccggttacggctacgctatgcatgctgaacgtaatgtcgatctttccgttcggtgtatcccaagtctgcatatgatcaaccggcttaaaggatgtggtggtaatcacccagaccggccgccctttttcaagctggcggtacactgaagaaatgtcttttcccgtaagatcgtatactttgtttcccgcatattctttggcaagtttatcaatcggctcatgataaacgcctaaacccgggccgttttccatatctccggcaaatccttcattcggatctcccttcagcccgctgctgtatgtgagcggaactttattgattttatccgccaatgtattttttgacacatgatatccggcattgttcaaaatcatggcaaggctggtcacctcacagccattgtacagtctgggagaatccatctgtctgtacagaacgacattcagcggtgacgcgctcccttttaacggtgttttctcatcaggctcgtcggactgctgattgaaaaaatttaaatgaatatcgtttgtatagatgttatatcccagatagacaaggatggctgtcagaatcagcacacataatgttccaagcgtcttcattatcaattattctcccttgtttctgatgaagctgttctatgtattatagcacttctgctcaatatgattcgatcgttccgatatgtttacaggtttgttcattctttagccatgtttatggaaaagaataggcggacattgggcgttgcaatccattcttttatctgctaacatattatcatattagcgaactaaaggattcggaattttccttcagacaaagcggaggtgtaaaaggcaaatgtttatgtttgagaaaccgcatggcatgagagatacgctgcccggtttatacgaagccaagaaaaaagtccgttccacactgacggatttaattgataaatggggttatcagtttatggagacgccgacccttgaattctatgaaacagtaggcgtccagtcagccattgaagaacagcagctgtttaagcttctcgatcaggacggaaaaacgcttgtgcttcggcccgacatgaccggaccgattgccagggtggcggcatctaagctgcacaaacacaatcatccgctcagagcggggtacgcggcaagcgtctatcgcgctcaggagcgggaaggcggacgtccggccgaattcgaacaggtcggcgcggagctgatcggcgacggatcaacaagcgcggacgccgaggtgattgcgctggcggccggcgctttgaaaaacgcgggattgcaccggtttaaaatcgcgatcggccatgccggactcgctgatgagctgtttgtcgaggttttgggcaatgccgagcgggcggatgttctgcggcgctttctctttgaaaagaattacgtgggatacagggaacatgtcaaatcgcttccgctttcttcaatagacaaaagccggctgctcgcacttttggaattgcgaggcgggaaagagatttgcgccaaagcggaggagatcatcggaatctccggacaaagcttaattcaggagctggaagacctgtgggacattcttgaggattacggatgtgccgagcatattcgccttgatctgaatatggtaagccatatgagttattacacgggaattttattcgaagtgtacgcggcaaatgtcggtttcgtcatcggaagcggcggacgctataacaatctcctcggccatttcggcagtcccgctcccgccacgggcttcgggctccgtatcgacaggctgattgaagcgctcggcattcaggaagaaacaagtgaagcggacgccgtgattttcagcaaggagcagcgggcccaggctattttattcgcggaggaagaaagggcgagaggcagaaaagtcgtcctgcaggatctggcgggcattgaaaatatcgatcatatgacaaaatcattcgcaaacgtcacatactttatcggtgccagaaaggaagagaggaatgggtaaggtactcacaatggcaatgccaaaaggacggatattcgaagaagcggccgggttgctgaggcaggccggatacaggctgcccgaggagtttgaagaatcgagaaaactgatcattgacgttccagaagaaaatctccgctttattctggcaaagccgatggatgttacgacttatgtcgagcatggcgtcgctgatgccggtattgccggaaaggatgtcatgcttgaggaagagcgtgacgtgtatgaggtgctcgatctgaaaatcagcaaatgccatctcgccgttgcggggcttcccggggcggattggaacggagtcgcaccgaggattgcgacgaaatatccgaatgttgcgtcgagttatttcagagagcagggcgagcaggtggaaatcattaagctgaacggctccattgagctggcgcctttaatcgggcttgctgacagaatcgtagatatcgtatcaaccgggcggacattaaaggaaaacggtctcgttgaatcagaacatatttgtgacatcacatcgcgttttatcgtcaatccggtcagctaccgcatgaaggatgatgtaatcgacgaaatggcggccaggctggcacgggttgtggaaggagaaacggcaaaatgaacataaccgcagtaaaaagaagcgagcggttttcactgaagcgttccatcgacagcggaaccgaagagcagcggaaaaccgtcagggggattattgaagacgtcagacaaaacggtgacaaagccgttttggcctatacaaaaacatttgacggcatcagcctgaaccaaatggccgtgagcgcagaggaaatcaccgaggcataccgtctgcttgatgatcagctgctggaagtgatcagacaggcgattgccaatattaaagaatatcacgagcgccagctgcaatcctcttggttttaccatcgcaaagacggctcgatgctcggacagaaaataacggcgctcgattccgcgggcgtatacgtgccgggcgggacggccgcttatccgtcttccgttttaatgaatgtcatccccgcgctcgctgcgggagtggaacggatcgttctcgtcagtcctccgggaaaagacggccgcctttcaccgggcgttctggcggcggcgtctgagctcggcataaaggaaatttacaaagcgggaggcgcacaggcgattgccgcgctcgcttacggaacggaaacgatacagcctgttgataagatcacgggccccggaaatatatttgtagcactcgcgaagcgcgaagtcttcggcgttgtggatatcgacatgattgccgggccaagtgaaatcgtggtcctggcagacgatacggcggtgcccaaagaagtcgccgctgacctgctttcacaggccgaacacgatatgctcagttcaagcgtgcttgtcaccgattcacagaagcttgccgaagcggtatcagatgaggtgaataaacagcttcagaccctgccgcgcaaagaaatagccgaagcgtcgatcagggatcacggccgcatttatattacggaatcgatggaagatgcggtggacacggtgaatgagctggcgcccgagcatttagaaatcatgacgcattcgccggaggctttgcttggaagcatcagacacgcgggggcgattttcttaggacgatacagcgctgaaccggtcggcgattattttgccggaccgaatcacgttttgccgacaaacggaacggcgcggttttcaagcccgctgaatgtaacagattttcaaaagaaatcgagcatcatctcttacagccggaaggcatttgaaacgcacgcggacagcatttccgccttcgcgagactggaagggctggaagcgcacgcaagatcgattgaagcgagaaacggaggaatgaccgatgagaaaagcggaacgcgccagaacaacaaatgagacggatataaggctggctttcgaaatagacggagaaggaaaagccgacatcagcacggatgtgccgtttatgactcatatgcttgatttgttcacaaagcacgggcaattcaatttaacggttgacgcaaaaggcgatacggagatagatgatcaccatacgactgaagatatcggcatctgtttagggcaggcttttttggaggcgctcggtgataaaaaagggatcaaacggtacggatcagcgcttgtgcccatggacgaagcgctcgcccaagtcgccgtagacctgagcaaccggccgcaccttgagatgcgcgctgcatttccgcaagcgaaagtcggaacgtttgataccgagctggtacatgaattcctatggaaactggcgctcgaagcgagaatgaatctgcacgtcatcgttcattacggcacgaatacccatcatatgatagaagccgtatttaaggcgcttggcagagcgcttgatgaagcgtcatccattgatccgcgcgtcaagggtgtgccgtctacgaaaggaatgctgtaaatgatcggtgtaattgattacggtatgggcaatttattcagcgtgtcgaaagcgctggaacgcgtcggcgtcccgtatgtcgtatcagaccggccggaagagcttgaaaaagcggatgcttttattcttccaggtgtcggatcattcagtgacgccatggacaatttacgcagcacgaagcttgatcaattcatacaccgtatggttgacgagggtaagctgctcctcggcatctgcctcggcatgcagctcattttcgaagagagcgccgaaaacggctctgcaaaaggacttggtttattagccggaaaagctgtgagactcaaagacagagatgccgaaggaaacaagctgaaggtgccgcatatgggctggaaccggctgacgtttcaccaaacgtctcctttgctttcggaagcggaagaaggcttcgtttactttgtccattcctattatatagacgggatggaagacggcgatcttctggcaagcgctgagtacggcgttcgtgttccggctgtcgtcgggaaacgcaatgttttcggtgcacagtttcatccggaaaaaagcggtacagccggaatggcgatcttaacacaatttacaaaaatggcagcggaacagaaggtgaagaaatgaacgcttttacattatatccggcaatcgatatgagaaacggcaaatgcgtccgcctcatccaaggcgattacggcaaggaaacgatatacggtgactctcctttagacatggcggcgcaatttgcacaagaaggcgccgaatggattcatctcgtggatcttgacggcgcgaaagcaggcaggaaagtaaacgacaggcatgttcttgacattgcgcggcagcttgatgtcaaagtcgagatcggcggcggtatccgttctgaagcggatgtgtacggttatttatcacaaggcgttgatcgcgtcattctcggcagctcggccgtttccgatccggcatttgtgaagagcatgctgaaacaatacggcggcaaaatcgcgatcggccttgatgcaagaaacggatatgtctcgacggaaggctggctggaaacatcctcggtaatggcggccgatctgggccgtgaattggcggccgaaggagcggaaaccttcattttcacggatattgcaactgacggcatgctgtcaggaccgaacatcgaaagtaccgttcagctcgcaaaagcaacgggaaaagacgtcatcgcttcaggcggagtcagctcagtcgccgacctcaaagcactggcccgcttcaaagacgccggcgtatcgggagcgattatcggaaaagcgctgtatacaaaacaattttcattggctgaagcgctcagaagggtgaaggacgcatgatcacgaaacgaatcattccgtgtctcgatgtgaaagaaggacgcgtcgtcaagggcattcaatttctcgggctgaaagatgcgggcgatcctgtcgagctggccgaagcctacgacagggagggcgctgacgaacttgtttttctcgacatttccgcctctcacgaaggccgcaagacgatgacagacgtcgtagaacaagttgcggcaaaactggcgattccgtttacggtcggcggcggaatcaatcaattaagcgatatgaaacgaatgcttcgcgccggcgctgacaaggtatccgttaatacagcggccgttctccgtcccgagctgattacggaaggagctgagtttttcggctcgcaatgcatcgtagcggcgattgacgcaaagtatgacgaagattcggaatgctataaagtgtacacacacggcggcagacagaaaaccgagcgggaagtcacggcctgggcaaaagaagccgtcagccggggagcgggtgaaatcctgctgacaagcatggacgcagacggtgaaaaaacaggctttaatcatacgctcacacagcttgtctcacgtgccgtcccggtgcccgtcattgcgtcagggggagccggcagcgcgcgccatatgcttgaagccttcacagtcggtgaagcggacgccgcgcttgcagcttctattttccattacaaagagacatctataaaagaagtgaaagattatatgaagaaacacggggtgaatgtgagatgaaacaggcagatgaactgcggtttgacgaggccggactgatacccgccatcatacaggatgcggcaagcaaagaagtgctgacactggcttatatgaaccgagaatcctatgaaaaaacgatagaaacgaaagaaacctggttttacagccgttcacgcggggagctgtggcataaaggagcgacatcggggaatacccaaaaggtgaaagccatccgttatgattgcgatcaagatgccctcgtcgtgcttgcggagccctcaggacccgcatgccataagggaagctacagctgtttttccacggaaaaagcagacgcgcaggatcgtttcggcatcttaaatgaactggaaagcgtgatcgccaaacggcaggcggagatgcctgacggagcctacacaacgtacctgtttcgggaaggcgtcgataaaatcctcaaaaaagtcggtgaggaagccgcagaggttattatcgccgcaaaaaaccgcgaccatgaagaattaaaatgggaagcggcggatttgctgtatcatttgctcgttcttctgcgtgagcagtcgcttcctttggatgacgtgcttgacgtccttgcgaaacgccattctgcatctgagtaaaacaaacctcgcggagagacccgtgaggtttttattctgtcaaacttaaacattcaataaaatattccttatttccgcaaccgtaggcagatgaatttgataatattgactaatagagtttattttggtttttatcaaaaatatacgttttgttcatattccgttcatgcacatccgttatagtataaacagtgatataggaggaaaacatatgccgaataaacaaccaaaaccaaaagggaaattcagctcattcttttcattagtcaaaaaaacaaaaccatcatacggtatgctggccttcgcgctgtctctcagtattgtgacaacgctcgtcagcctgctgattccgctgttgacaaagcagctcgttgacggcttttccgtgtcgtcgctgtcaggcgtgcaaatcggaatcatcgcagccgtgttcatcgtacaggccgcattaagcgcctacgccacctacgccctgaactacagcggccagaaaatcatctcgggactgcgtgatttgttgtggcagaaattaattaaactgcccgtctcttattttgacaaaaacgccacgggagaaacgatcagccgtgtcaccaatgacacaatggtggtaaaagagctgatcacaaacaatatcagcggatttattaccggaatcatttccgttatcgggtcactgacgatcttatttttcatgaactggaagctcacattgctcgtgctgatcgtcgtgccgctggctgcggtgattttagtgccgatcggccggaaaatgtttaaaatttctcgggaaacacaggatgaaacggcgagattcaccggattattaaaccacatcctcccggaaatcaggcttgtaaaagcgtcaaacgctgaagaagcggaatacggacgcggaaaagcaggcatcatggcgctctttaaactcgggctgcgtgaagcgaaggtgcagtcgctcgtaggcccgcttattacacttgtattaatggcggcgctggtcgctgtcatcgggtacggcgggatgcaggtgtcatccggtgaattgacagccggcgcactcgttgcctttatcctgtatttgtttcagatcattatgccgatgggccagatcacttcatttttcacacagcttcaaaaatccgtcggcgcaacggaacggatgattcatattcttgcagaaaaagaagaagatatccaaatcggaaaagccattgaaaacgcggatcagccgattaagctcgaacaagtctcattcggctacaaaacagatcaaaccatcttaaaagacattacggctacgattgaggccggcaaagtcaccgcgatcgtcggaccgagcggcggcgggaaaacaacgttatttaagctgcttgaacgattctacaacccgactgcgggcagcatcctgctcggaaatgaaccgattgatgcgtattcccttgagtcatggcgggagcatatcggctacgtgtcgcaagaaagcccgttaatgtcaggcaccatccgcgacaatatctgctacggattaaaacgcgaggtgactgatgaggaactgaggcaagcggctgacatggcctacgccctgcaatttattgaagacttaccgaagaaatttgaaacagaggtcggtgagcggggaattatgctgtcaggcggacagcgccagcgcatcgccattgccagagcgctccttcgcaacccgagcattctgatgcttgatgaagcgacatcaagtctggacagccaatctgaaaaatgggtgcagcaggcgctggaagttctaatggaaggccgcaccacgatcgtgatcgcccatcgtttatccacggttgtggatgcagatcagcttctctttgtcgaacagggtgaaatcaccggacggggcacacaccatgaattaatggcatcccattcgctgtaccgcgattttgcggagcagcagctgaagctgaatgccgacttagaaaacaaagctgtgtaaagcaagactttatgaatagaaagcagctgaaaaagctgctttttattttgcagccggagttctcttcatagaaagcgggggttaaattatgaaaaaacgcacaaagattttttattggcacgcggccttactgctcgtattcatgactgccgggtgtacggacggtaacgatgaagagccgagccattcttcaagtccggccggagaaagcagcggcatcaacaaggctgaaacagcatcagcggcagaaaaaaaagaaccagtaaacaaagattcacatcacatctctgcggacaaaagcctgtcggcagattattctcctctgcaaattgaatatgcccgcatctggctgcagcttggggaaaatcagcagatagatgaattgaacgttcgccgcattccggccggagcactcgtcaaccctgacgatcatacgagcgcccgctatcccgaagatgttacgcagttagcaggctcccggttagtcgatgggtcagtcacttacagcagcaatggtgacggcaccattcagatatacaatgttcctttgcgctgggagtctcgtgaagatactgatcaaggcgtaatgaaagaagtgacggaggaaatgatccgccatacaaaaaaagtgtctgtcgatacaggagacaatgaaaaaataagatggttaatagacatcatgtcgattcattaaaagaagacaggcaaaaaagcagaaggagggatttttatggctgtcatattggttgcggatgacgaccgccatatccgtgagcttgtccgactcatgatggagcagagcggctttgacgtcgcagaagcggaagacggggaagcggcggtgcggctgatcgaatcagcacctattgatctcatcatactggatgtgatgatgccgaaaatggacgggtttgaagtcagtgaagccgtccgcagctttacggacattccgattttgatgctgacggcaaaaggcgaaacgctggacaaagtgcaaggttttacttccggagcggatgattatctcgtcaaaccgtttgagccgcttgaactggaagcaagggtcaaagcattgctgaaacggtaccggatcaccgctgaaaaactgctgaccatcggaaatgtcacattagataagcaatcccgcaccgtaacgcgcggcggcggagcgggattgacgctgccccggcgtgaatttgagcttttatttaagctcgccggttatccgaataagacgttttcaagagaacaattaatagaagatatttggggctttgattatgaaggtgacgagcggacggttgatgtgcatgttaaaaggctgagggaacggtttccggaaaaggactatccgtttgctatccatacggtgcgggggctcgggtatcggtttgtggtgacagaatgaaacggatcttcagaacggctggaaaaatcatcatccttctcaccgtcaccgcattcttatggctggcggctcatctgatcgttcagggattcggtctcatatggccgattttgcttgtgccgtacgccgagcagattctgacgctctggcttgttttcggcctgctgtttataacgatgtttatcttttcaaagtcagcacgtgaaagacatcatgcgatctgggattcactgaccgccacgatcaagcaaatgtcgagcggcaacttcacagcggccgcctccaggaaaatggagaagattgaacgggaccaccccgtgacgaaattggctgatgaactgtcgacactcgccgcggaactgagtgaaatggaaaagctgaaacaagaatttatttcgaacgtttcccatgaaatccaaaccccgcttacttcattaaagggctacgcgcacctcctgaaaaaaccggatttatcatatgaggagcgggggcgctatttacacatcatcgagacagaaacagaacgattatcaaaaatcagtgaaaatctgctgaagctcactgcgcttgaacgccaaaccgaaccgatacaaaaaaaaccgttccgcattgacaaacagctgcggcgcaccatattgacctgtgagcctgaatggtccgccaaacagattgagtttctcattgatttacaggagtcgtatgtgtacggagatgaagcgctgctcagccaagtatggatgaatctgattcacaatgccgtgaaatttaccggtgaaggcggccgcatttccgttaaaattgttgatctgccgggagcggcggctgtcgaaatcgccgacgacggaatcggaatggagcctgaacaggcggagcgggtatttgaacggttttataaagcggataaggcgagaaacgcagggggaagcgggctcggcctgtccatcgcccaaaaaatcgcagagctgcacggcggttcgatagaggttgagagcaagcgcggcgaaggaacccttttccgcgtcattcttccagccgagcctcgtgaaaaaaacagctaaaatctggtcgaaccagccagtaaaaaacgaagccgatcctgtcttttgaactattgaggcgaaaccgttttatggtatactactgacggtaatacgtataaaacggaggatatttgtgggaaaacacacttctgaacagaaaaagcacgcgcaaattgtccagctgcttcaggatggacaatatttttttcataaaggcttaaaagcatataaagagcggaatttaaaacgggccagcaaactgattcagcgggccgtccatctcgagccgaatgattccgaaatgctgtcacggctggccgtcatttattctgaaatgggccactaccagcagtcaaatgagctgttcgactttattttggtgaacctgaaagaagaaatgcccgagtgtcattattttaaagcgaataatttcgcgcatttggggctctttcaggaagcatacaaagaagcggaggcttattcagatgccgatccggacggggaattcagcgaagagattgaaaatctgatggagcttttggatttcggcgaagcgggtgaaaacgaatcgctctatgaccaggatgagctgctgatcaggcaggaccgggcaaaaacgcttcttgagagcggccagcttcatgaagcggttgtcatgcttgaagagattacggccgattaccccgagctttggtctgcatacaacaacctggcgctcgcttacttttactcaggcaatgttacaaaagcgaaacagacggtattcgaagtgcttgagaaaaatgaaggcaatctccatgccctgtgcaacctccttgtattctgctattacgagagggaagatgaaaaagtcggagaattgagcggaaaactcgccaacgtgtatccgattttattcgaacagcgctataagctgggggcgacgcttgcgcttgtcggcagacatgatctcggttataaatggctccgttctctttacaaaagcgggttcgaaggcgacgaaacgttttattactggcttgccgcctcagcctacgggacaggccgcacagaatttgcggaaaccatttggaaaaaggccgaagccgaatttcccgaatcagaccggcccgcgccttgggcggagcggcaggaaccgctgcctgcttcacttgaacagcggcttgccgcctattatatcagcagcgctgaaggagagcggaaccagcttgaaaaagttctgacggcaaaacgcgccgtttcaccgtttgaacaagatttcgtcagactgctgctttccggtgaaaaaggcgcttcaggcgtctccggtgacgcgctgttcacgtatcggacggtcaagcttctggagaaagcggaagccgacagtttaaaaactgacgtcatgagctgctgggtttttcacgtcattcagcacatccgcgccgccgctgccgtacagaatgagcgggcatgggccgcagccatcgcatacgtatggaaagaagcaaacggcgaaaaaacgacgaaaaaagaaacggccgccgtttacggtataaccccggcaaccctttcgaaatacatcagacaaatagatgatatattagaataaaaccgattctttctatataaagagtcggttcttttttttattataaaggggcaaaacagaactttaccgccgaaaaaagaggtattcatacgtatttttttgctttttgaatcgaaatcaggccgtaatcaccgtttattttgcaaaatatgagatttgcaatcacattgaaatataactgtaataaaaattgtcgaaacatgatggtataatgagtctcgtacataagagattagtttattttacatgtgctgtataatctataccaattaaccagattcaaagaatcgtacataaaaatcatcagcctcacgggcatgtgagggagcgtaactttgatgttcataatagaattccaaatgagaacaggtttaaagtaaaagggaggaaagaaaaagtgaaaaagagtttattaacacttggtttggcttccgtcatcgggacaagcagttttttgatcccgtttacaaaaactgcatcggcggaaacattagacagcaaaaaagcgaaaattgaaagcaagcaatctgaggtggcttcaagccttgaagcaaaagaaagagaattgtccaagcttcaggacaagcaggctaagattgaaaaagaactgaaagacattaacgctaaagcgttggatacaagcaataaaatcgaagataaaaaagctgaaaacgaaaaaacgaaaaagcagatcgctgatttgaaaaaagaaatcaaagaaacagaagcgcgtattgaaaaacgcaatgaaatcctgaaaaaacgcgttcgttctttacaggaaaacggcggttctcaaggatacatagatgtacttttaggggcgacaagcttcggagacttcatttcccgtgcgactgcagtatcttctatcgttgatgcggataaagacctgatcaaacagcaggagcaggataaagcgaaactcgaagacgcagaggctgaacttaacgtgaagctgaaaaaagttcaagatgatcttgcgaaactcgagtctatgcaaaaagacctgaacaaacagcttgatcagaaagacaagcttttcgacgaagcgaaaaacggtcagaaaaaagcggcttccgctatctctgatctgaaaaaagaagcgtcacagcttgcaaaccaaaaagctgacactgaaaaagagcagaagcgcattaaagctgagcaggctgcagcggctgccctgatcaaaaaacaggaagaagcgcaaaaagcttctgaagaccaaaaccaaaaagatgacagccagccggcaccggcggttaaaactgtgaaaaaagcggctgtttcaacatcatctgattcatctgacagctcaagcaaaccgaagagcacttcaggcggatcatctcataacagcggcggttcagatgattctgacggcggatctgttatttcaaattcaggcggtattgaaggcgcgatcagcgtaggatcaagccttgtgggtcaatctccgtataaattcggcggcggacgcactcaatccgatattgacaaccgtatctttgactgctcttcattcgtacgctgggcttatgctaacgcaggcgttaatctcggacctgcaagcggcacaaacacagatacattaatcggaagaggtaaagcagtaagcgcgtctgacatgaaacgcggagacttagtattcttcaacacgtataaaacaaacggccacgtcggcatctacttaggtaacggaacgttcctgaacgataatacatcacacggtgtatccattgattctatgagcaacccttactggaagaaagcattcaacggcaatgtaagacgtgtcgtgcaataatgaataagacaagggccttctatcccggaaggctctttctttatttgtatacccgctcaggagctccctaatcacggtttctcagaaaaatgagcaaaaaaatagcgaattgccctcagatttaataggatatgggtaaggaatacgattgatggggattcttagtcatatagggtgcgccccatttcgaaaaggagtgaatcatggtgtcagaagaaaaaatttatgatgtgatcattatcggcgcgggtccggcggggatgaccgctgctgtttacacatcacgagcgaacttatccacattaatgatcgaaagaggaattccgggcggccagatggccaacacggaggatgttgaaaactatccgggttttgaaagcattctcggccctgaactttctaataaaatgtttgaacatgcgaaaaaattcggtgcggaatatgcgtacggcgatattaaagaaatcgtggacggtaaagaatataaaacggtcaaagccggttcaaaagaatataaagcgcgcgccatcgtcatttctgccggagcggaatacaaaaagatcggcgttcccggcgaaaaagaactgggcggccgcggcgtatcgtactgcgcggtttgtgacggcgcgttctttaaaaataaagagcttgtcgttgtcggcggcggagactccgccgttgaagaaggcgtctatctgacacgcttcgcttcaaaagtcaccatcgttcacagacgtgacaaattgcgtgcgcaaagcattcttcaggcgcgtgcctttgacaatgagaaaattgacttcaaatggaacaaaaccgtaaaagaaatccatgaggaaaacggaaaagtcggcagacttactcttgtggataccgtgacgggagaagaggaagaattcaaagctgacggcgtctttatttatatcggtatgcttccgctttctaaaccgttcgaaaacttgggcatcacaaatgaagaaggctacattgaaacaaatgcccaaatggagacaaaagtcccaggcattttcgccgcgggagacatccgtgaaaaaacgctccgccagatcgtaacggcgacaggcgacggaagtattgcggctcaaagcgttcagcattatgtggaagagcttgaggaaacgctcaaaaccgttaaataatcactgtaatgttcagtttttgaatcgttactgtgttttaattacgctgtaacacgggtgaaatactgatgttttaagatgaatgtagtaattgaccccctttttaatgaatacactttggcacggattccagtatccgtgccctttttttgcgattttttgttttctgtcaaataaaagaaaaggatgtcggtgtctctgcattgtgagagacatgccgaaacggtataatgaagagacgatgatttgttgagaaggttaggtgacgtacttgtgcaaagagtgacaaattgtgtgctgcagacagatgatcaggttctccttctccaaaagccgagacggggctggtgggtcgcgcccggcgggaagatggaaagcggcgaatccgtcagagattccgtcatcagagagtacagagaagagacgggcatttatatactaaatccgcagttaaaaggcgtgtttacctttattattaaggaacaggaacaaatcgtgtcagagtggatgatgtttactttcgtcgccgactcctacacggggcggaatgtcgctgaatcagaggaaggcgttctgaagtggcatgacgtaaaagatatccacagccttccgatggcccccggagacgggcatatccttgattttatgatcaagggccaagggcttttgcacggcacctttacgtatacgccggacttcgagctgctcagctatcgtttagatccgcagcttatcaaataaaagaaagaccgcagggggggagaaagatgagtatgaatgaaaaccatgatattcagctcgtcatcattacgggaatgtctggagcggggaaaaccgtcgccattcaaagctttgaggatctcggctatttttgcgtcgacaatctgccgccttccttgctgccgaaatttttggagctgatgaaagaatcaagttcaaaaatgagcaaggtcgcgcttgtcatggatctgcggggacgtgaattttttgacaggctgattgaggcgctggatgaaatggcggaaaatccgtggattacaccgcgcattctctttttagacgctaaggattccatccttgtgacgagatacaaagaaacgaggcgttctcacccgctggccgctaccgggcttcctcttgaaggaatcgcgctggaacgccagctgcttgaagaattgaaagggcgctctcagctgatctatgacacatcggatatgaaaccgcgtgatctgcgtgaaaaaatcgtggcgcatttcgccacgaaccaaggtgaaacatttacagtgaacgtgatgtcattcggtttcaaatacgggcttccgatagatgccgacctcgtgtttgatgtaaggtttctgccgaatccattctacattgaaagcatgaggccgcttacggggaaagatgaggaagtgtcatcctatgtgatgaagtggaacgaaacacaaaagtttattgaaaagcttgttgatctgctcggctttatgcttccgtcttataagcgggaaggtaaaagccagcttgtcatcgcgatcggctgtacgggcggccagcaccgctccgtcacgctcgctgagtatttggctgactattttaaaaaagatttctatactcatgtcactcaccgggacattgaaaagagaagccggaaatgaataagaagccgaaaatcgcaatcttcggcggcggaacgggtctgtccgtgctgcttcgggggttaaagcataagcccgttgatattacggcgattgtgacagttgctgatgacggcggaagttcaggccgtctgcgggatgaacttcaaattccgccgccgggtgacatccgtaacgtactggctgctttgtcagatgttgagccgctcgttgaaaatctgtttcagcaccgtttcaacaaaggaagcgacttaaccggacattcgctcggcaatttgattttggcagcgatgacaaatataaccggtgatttctttcacgctgtcaccgaaatgagcaaggtgctgaatgtccgcggcagagtgctgccggctgccaacaccagtgtcgttcttcacgctgaaatggaggacgggcaggtcgtctccggagaatcgacaatcccttcttacggccagcgaattaaacgggtgtttcttacgcctgaaaaaattgatccgctgccggaaacgattgacgtcatccgtcaggccgatttaatcattatcggtccgggaagcctgtacacaagcattcttccgaatctgctcgtgccgaaaatcggagaggaagtcgtcaaggccgcggccaaaaaagtatatatatgcaacgtcatgacacagcccggcgagacgcttcaatacagcgcggccgaccatgtcaaggcgctgaacgatcatatggagcagccgtttatcgacacgatcttaatcaacaatgaggagatccctgacgaaatcaaaagcaaatatgcgaaagagctggcccggcccgtcgacttcaatgttgaaaagctgaaatccatggggcttgaggtcatcagggatcagattatcacgtataaaaatggcgtaatccgtcacgatacacataaagtggcttctcttcttgtcgatttattaagggactagaggccttttgaaatgaggtggctaatatgtcatttgcatcggaaacaaaaaaagaactgacgaatctggaagtgaaggactgctgcgccaaggcggagctgtccgcgctgattcggatgaacggttccctgtcattttcaaaccgccatctcgtgcttgacgttcaaaccgaaaatgcggcgattgcccgccgcatttatacattgctgaagaaacaatatgatgtatcggtcgaactgttagtcagaaaaaaaatgcggctgaaaaaaaataatgtttatattgtgcgcttttctgaaaatgcaaagctgattttagaggaattgaaaatcctcggggagaactttgtatttgaacggaatatttctgaggaactggtggcgaaacggtgctgcaaacgttcttatatgagaggggcgtttttggcgggaggatctgtgaataatcccgaaacatcgtcgtaccacttggaaatcttctcgctttataaggaacataacgattcattatgcgccctgctgaatgattttcatctgaacagcaaaacgcttgaacggaaaaaaggctatattacgtatttaaaagaggcggaaaaaatcactgaatttctgaatgtcatcggcgctcacaattcactgctgcgctttgaagatgtgcggattgtcagagatatgagaaactcagtgaaccgcctcgtcaattgtgaaacagcaaacttaaacaaaaccatcggggcttctctcagacaggtggaaaatattaaatacattgatgaacggatcggtcttgaagcgctgccggaaaagcttcgcgaaattgcgcagctgcggattgattatcaggaggtcacgctgaaagaactgggggaaatggttgcaagcgggaaaatcagcaaatccggcatcaatcacaggctgagaaagctcgatgaaatcgcagaacagctgcgtacaggacaaagcatcactttgaaataaccgtacagaaaaggggagatcttatggttcaggggaaagtggaagtgcgtttaaagacgggattgcaggcgcgccccgctgcattgtttgtacaggaggcaaatcgttttgcatcagatgtgtttcttgagaaaaacggcaagaaagtgaatgccaaaagcattatgggattaatgagtctggcggtcagtacggggacggaagtcactctgatcgctgaaggcgacgatgaaaaggaagcgctggaaaagttgtccgcttatgtgcaggaagaagtgtaaacactttgtaagggggacggaacgatgaatgagtttctgaaagattgttatcaaacgataggctgggaaaaggattccctcgatttcagcaacctgccggagtttttaaaggcgctcgcgtatcggtttccgtttgaaaaccgcgccgttttgtccaaaaaagaatatgacgtcacgaaagaaggactgtggcggcacatggtgaaggaacctcacggcggtctttgttatgacttgaacggactgctttatttcatcctgaaagatgccggatttgatgtcaaattgatccgcggaacggtctggaaaaacggctgggcgctgcccggcacacatgcggccgtacttctttccgccgggggaaatgagtacatcgctgatgcaggcttcggcctcaatctcgccatgcagcctgtgccgatgtcgggagacgagacggtatcagcggccggagcgttccgcgtgaggatagaagagacggaattcgggacatacgtgcttgaaatgaacaaaggggacggctggcagacaggctacgcattttcgcttgaagaaatcgatgaaaaggacctcaagtctatgaaacaaacaatctttgaacatgaacgttctcctttcaacaaacgcctgcttgcttctaagcggacaccggaagggcacatggttctgtctgaacgcaatataacaataaaaaaacacgatggcacggcggaaaacagcagaatagaccgctcagagtttgaagaaaaatttactgctcattttatatgaagcttgcagattctctgcaaaaaaacggcctccgcagggaagccgttttttgtatgtgtttatctcatttttgtaaaggtttgatagtggtctgtcgtcttataaatcagccagtcgcttgagtaaagaatccggtctgaatttctgaagcctgatgtatagttaatatccgcttcacgccacgtccgtccgctttttacagggagtttgccttccctgtttgagaagatgtccccgccgatgcttttccccggggcgacgtccgccagattcccctttgatgccacccagccgagggcctgtgcttctgattttgtaatgtagttatcaggaagcttgtgataggtctgaagataatccgcaaccccgtcaaacgtgttgataacctgtgcttcagtgtgcgccttgtgagaagatgtatccgtcttggcagccgttgaaaacagcatccccgccgcggagaacagcaccagcaaacaaacggaaatccacgataatcgttttttcaaagcaatacctcccatttttatcatgtgaagctgattccttttcattgtatcagcatcaagagaaaggaatagaaagaattttaaaatagtacttttgatctagcgaaaaataaaccccggctgaaacggccgggatttttcatctcattgaaattccttcgtgaggtttttcggtgtttttccgtatacggcgtcaatcatgttctgtgcggcttgcttgaacatattcaagcggatttttgcggttgctgacccgatatgcggaagcaatgtgacgttttccagctgcaggagcggattatcttcggcgatcggctctttttcaaacacatctaaaccggcgccttttatccagccctcttgcaatgcgcggatgagcgctttctcatcaactgtctttccccgggaaatattgacgaaacatgccgtatctttcatcaatttaaattccctctctcccatcatatgatatgtttcgtcagtaagcggggtaattaaaagcacaaagtctgatgttttcagcagtgtatctaagtcggtatatgtaaccccgagttccttctcggcatccggttttctgctgcggttataatacagcacgtccatatcgaagccgaattttgcccgtttggcagcttgttcaccgattctgcccatgccgataattcctaatgtctgatggtggacatccataccgaaaagagattcctcctcaacggttccccatttgccggcgcggacgaatcgatccaattcggcaacccgtctggcggaagacagaattaatgaaaaagccagatcagcgacagtgtcatctaaggtgtacggtgtatgcgtgccgacaaccccgcgccttttcatttctttaatattaaaattatcatagccgactgaattattgctgacgaccttcagcttcggcgcgtgatccagcaaatcactgtcaatcgccgttccggatgtcagcagcccttcagcatctttcattttttcgtacagtttctcttttggaatggtatcttctttccagatgtcatagcggcaatgctcgtctatcatttgttcgacttcgggcggtatcggtttcgcgatgaatacatagggtttcaacgggcttctcctcctttgtctttcttctctattttattatataagagaagcggtaacgtgagaaataatcaaacgcattacgataaatttctggttcttttgaacttaaaatgaaagaaaaaggaatgtacatgcttgatttctccaaacaataacagaatccgcctatatttctgaaggcaaaatgagcggaaccgctgttttcaaaagctttataggttggtgtaaagataaattttattatttttgaaagatataaatgaatataatctgaatttacagtcaaattatcgtgtctttttttgaaagcgcttttgaggcctttttctgtgctataattccttactgtaagctgggtaagaaggcttgcaatacaatcggatgggagatgaatagaaaaatggtttctttatcaagcattttggagcacaaccagcagtttgtccaagaaaggaaatatgaaccttaccaaacgacaaaattcccgaaaaaaaagcttgtcatcgtatcctgtatggatacaaggctgacggagcttctgccgcaggcgatgggactcagaaacggcgatgccaaaatcataaaaaacgcgggagccattgtttctcacccatttggaagtgtcatgcggagcattttggttgccgtttatgaactgcaggcagaggaagtctgcatcataggtcaccgcgagtgcggaatgtcgggattaaatgcggcttccatattaaataaagcaaaagagcgcggggtggaggacaaatgtctcagccttctgcagcatgcgggagtcgatttggaaacatggctgaccggttttcacagcgtcgaagaaagcgtggcccacagcgtgaatatggtcaggcatcatccgctcttgcctgaagaggtgccggtgcacgggctggtgatcgatccgggaacggggacgctggatgtagtcgttgacggttatgaaacagtcaaaggaggatgcagctgacgatgcaatttaccggcagatatcagggatacaatttgcagaaatttcagaaagacctaatcgcgggaattgtggtcggaattgtagcgattccactggggatggcctttgccatcgcctcgggggtcggtccggaatacgggctttacaccgttattgtggccggaattctgatttcgctgttgggcggctctaaatatcagatcggcgggcctacaggggcgtttgttcccattttatttgccattgtgatgcagtatggttttgagaatttacttgtagccggttttatggcaggcgtcatgctcgtcctgtttggcgtatttaagctcggaaagattatgaaattcgtgccgaagccggtgatcgtcggatttacggccgggatcgcggtgctgattttctcggagcagattgcccattttctcggtctgcgcgatatccaaaagcatgaaagctttatcctcaacattgcggaaataggcaagaagatcggaacctttaatttgtacagcatcctcatcgcgggaattgctttggccattttgctgttatcagccaggctgatgccgaagattcccggcgcgcttgtggccctgcttgtctctacagccgctgcggtcgtgttttttcctgacaaaatggcgacaatcggttctgcttacggagaaattccgcggcagcttccggctttccagcttccggatttctcaattgataacatggtgatgatgtttccctcggctctgatcattgcgcttctcggcggacttgaatccatattatcggcgatggtcgcggacaatatgaaaggatcacggcatgacagcaatagggagcttgtcgggcagggcatcgccaatatggcagcgccgcttttcggcggcataccggcaacgggagcgattgcgcggaccgcaacaaatattaaaaacggcgcagtttctccgatttccggtgttgtccacggagtcaccgtcctcctcgtcctgctcgtcttcgccccgcttgccgttcacgtaccgctggcaagcatggcgccggtattgatggttgtggcttggaacatgagtgagcggagggaagtcgccaatatgatgcggctgaaaaacactgattcattcgtactggcggcaacctttttgctgacggttctgtttgatttaattatcggcgtttctgccggtcttgtgctcgcttttgttttctttatcagaaaaatgagcgaatcaacaagcattaaaacaccgcatgccgcggtcaaatcggttaaaaatgattcgtccgtcagcacatattccattgaagggccgctgtttttcggttcaattgattcactggaatcatcgctgctggagaggcttcaggaaaagccgaagacgcttattctgctgatgaataatgtgcattacatggatacctccgcagaagcggtgctggggaatgtgatgaaccggatcaaacggcataacgggagattgatgatcgtcggattgcaatcacagccgagagagctgatccggaagacggggctgtttcataaaatcgggaaacagcatttctttgagcatcaggacgagataacgggataaattcagatacggcctgtccatgaaaaagcggacgggccgtgtttttattcggtttcaaagcgcttgatcagtttttcctgatgggctttcatcgcatcttctaacgtgattccgtacttatcggcaaggatagccagatttccgaggacgtcacccatttcttcaatcagctcctgcctgcgttcagcctgggttgcgtccttttcatccggccggtctctgccgatttcatatgctcttaccgcccgggcgagctcacccgcttcttccattaaaaagccgattctgataaatggcccgtacgccgtccatcctcgtttttcgtaaaaatctttcgtccattgttctgcttcagccatctgcatgtgaaacactccttatgtcctgtatgattcttattgatattatcatatagagatgggacaatatatagtgtattttgatttattgatgtacatatatagatgcggagatgaaaaaatgaaaaccatttgtgtatttgcggggtcaaacccgggggtaaatgaagagtacaaacgcaaagcggccgaactgggtgaatatatggcggagcagggaatcggccttgtttacggcggttcacgggtcggtctgatgggaaccgtcgctgatgcgttaatggcaggcggcggaaaagctgtcggcgtcatgccgagcgggcttttcagcggagagattgttcatcagaatctgacggagctgattgaagtcagcggcatgcatgagcggaaagcgaaaatgagtgaacttgccgacgggtacattgccatgcccggcggtttcggaacatatgaagagttatttgaagtgctgtgctgggcgcaaatcggcattcatcaaaaaccgatcggactgtacaatgtgaacgggtattttgagccgatgatgaagatggtcaagtacagcatccaggaaggattttcgaatgagtctcatttaaagctgatacatagttcctcccggccggatgagctgattgagcagatgaatcggtatacatacccgattttagataagaaatggcgtgaattgtaaggcagcggtctgaaatatgtttcggcggctgcatctaattcattctgacggaaagttcttttctccttctcatgcgtaccacgcctttcttcgtaataagagatatgtctgagaataagaggcgaatgagactgctgttggggttgaaagaagaacatccatttcctcagaggagatggatgttttgcggtttccagactgtatgcgtttacaacttttgttgcacgaaagtttcttccgatatgaaatcatcctgctgcatcttttgtttttttgaaccgattccaaatataccgactgtcagtgcacaaagaaaccagcagcctgtaaagaataagaaaacacttaaaaatccgtagcctgaatacaggaaactgacgacaaagggaccggctacatttgcaaggcgtcctacgccgtaagtgaggccatttccagatgccctggcttcaaccggatataattccggcgtataagcatatgcgatcgaactgaaagtacgctcaaacatatgcatgagaaatccgcatacgataatgaccatcggcaaaggattgatgccgtaaaagaatccaagcgccataataattaacgataaaacagaaatggcccactttcgatccacacggtcagagatttgcgccgcaatgagagcgcccagcggggcaccgatcgttcccagagtgacgtatacgatagactcatccattgatacgccttctttcaccagaagggtgggaacccacgtgccaaagccttgaattgcaatggtggaagctgcccacatcgtcattaaaacaaaagttcttcctgctaaaggcttttgaaacagcgtccgatatggaacggattttacagcggtttgtctgctttgcagagccggagctggttcaggcagttcacccttttcattttctgcttttgcctccagttcaagcagaatgcggtgtgcttgttcgctttttcctttcgtgtccagccatttcggtgattcttccagttttctggcgatcagcggaaaaaaaataccgaccgcgccgaatagaaagacaaaccgccagccgtaagaggcggacggcacgaccaatttagccacccagccggccgcaggaattccgcatatgccgattgtaatacagattgcctggtatttgcctttagttgcggatgggaaaaattcgctgatatacgtactcgccacaatcgttgtggcgccgatacctaaactcgtaaaaaatctaaaaacaccgagtatttctgggttccaagccagagaagagaggagggagaaggaagagaaaaaggtgacaaccagaattaaaccttttttccttccgaaacggtctgaaaaccatcctccggcagaggcgccgataaacattccgaaataggagacagatgtaataaaagcgatagtatgagtggatatgttccattcctttaaaagtgaaggcgccgcatatgaaaacgtatttaaatcgataaaatcaaaaaagtaagcgaatgaaaggataacgagcactgcttgatgggcccttgaaaaaggcagtctgtttaatcgattagacgcatttacattgatcatctcgtattcctccgtttatctttgacttgtctgaagacggtattaaccaatgtgattgagcgtattcatgctgtaactttgtttagtaaacacatagccttcagagatttttcttgctgtgcgtactactttaatcgttgttccatccggatcaacatctgcctcggtttttaaaataccgcttggatgccccaatcggatcgttctcccggagaatgaaaattcagataatattgtatcttgcaatagcatgccggcagtcgtacataccgcccctgtaatggctaaagcttgatgcggtttttgcatggacatcatacgaatgacaagatccatctcttctgcgtgtctctttatcccttttgtatcgatataatccgctggagatgagattaatgtcagttttggtacggccggtgattttgcagcagcctcatgtctcggagcgaatctgcatttctcggctgcaatcgatcggatcatttcgagcttttccaatatatccggggtatattcatccggaagttctaagccggtaagccccgtgtcctctgcttttacaaagacaagcggattggcgtaatcaataatcgataccgagatatttccatacggggtatcgagaacatcaataggctgaccggtgggaaacagcttaccggtcaccgctccttcagcctggtgaaatgaaagataaataggagaagctgtacctggaacccccggaatagagcagtccccctggtaatgaaatgttccatttctgacttcgacttctgctgcgatcactttttgagtgtttgtatttaaaattctgacttttgtaaccggctcttcagcttgaacgagccctttctcaatagcataagggcctacggcagaagagatatttccgcaattgcctttgaagtcggtaaatttgtcagtcagactgacctgagcaaacgtatactcaacatctgcatcctttctggcggatttcttaataatggctgccttgcttgtgagagaatggccgccgccgagaccgtcaatttgtctctcgtcagggctccccataatgtctaaaagaaaatcgctccataggtttgtatcgtctggcatgtctttttgaagaataaaaacgcctttgctggtgccgcctctcataacggttacaggaactttttccatgctgtctcatccttacatcattttgtgtggataaaaaggtaccggtccctttggaagatatcgtatgataaataaggattataagtaaaacatataatttttataaagttaaataaaaaacttttataataggagaaaattttatagcagaaaaatattttgggggatttcatatggatgaaaaggattggattgtgctcattacattattcgaagaaaaaaatatgacgaaggcggcagagcgattatatatgacacagccggcgttaagttatcggctcaaaaacctggaagcacaattcggagtgcgccttttttataaaagaaaaaaagggatggagttcacttcagaaggtgaacatctggttgattattcgaaagagatgctgcaggagttcagaagagtgaaggatgatatgctcaatatgagccatgaagtcagcggggttctcagattaggagtctcaagcaattttgctcagtataagctcccggcgattctaaaacggttttctgatcagtatccgtctgttcaattccacgtcaatacgggatggagtgcgaaggtgatggatctgcttcatcattcgggggtacaccttgggattatgagggggaattatgattggcaaggagaaaaacaactgctgaatgaagagaggctgtaccttatttcaaaaactgaaatcaacagtgaggaccttcccaaattgccgatgatttattatcaaactgatgcttctttgaaaagtttgattcaaaaatggtggaataaccaatttactgaaccgcctttcattgcaatggaggtagacaggcaggaaacctgtaaagagatggtgaaaaacggcctcggttattctgttgtgccggaaatctgtcttcagccttctgatgaattatacacattggcgctatcctataaaaataatgaacctgtgatacgcgatacttggctcatgtatgattcttcagcgttagaattatctgtcgtcaaagcattcattacttttttgaatgggaataaagcataaaaaaacctgcaagagacatcatctcttgcaggttttttgggcattacttctggtcttccgtattgcgtgtcagcactttatcgattaagccgtattctaaagcttcatcagctgatttgaagttgtcgcggtctgtatcgcgctcaatgacttcaagcggctggccggtacgttcagcaagcactttgtttaatttgtcgcgaagcaagagaatgcgttttgcggcgatttcaatttctgtcgcctgtccttgcgctccgccaagcggctggtgaatcataacttcactgttaggaagcgcgtaacgtttgcctttttctccggctgcaagtaaaaatgctcccatagaagcggccataccgatgcagatcgtggatactttcggtttaatgaactgcattgtatcatagattgccataccggcagtgattgatccgccagggctgttaatgtaaatggaaatatctttttcagggtcttccgcttcaaggaataaaagctgtgacacgatggagttcgcaacgttgtcatcaatcgcagatccaagcatgataatacggtccttcaaaagacgggagtaaatgtcataagctctttctccgcggttcgtttgttcaatgactgtaggtattaaattcataatgctcctccttcaccttttaggtaagtatgtatttacatgatacatttttggtcaataaaggtcaaacaaaacgctgaccaaaatgccaaccttttcttctaacaccatttttcccataaaacaaaaagttcaaacagcaaagtgaaaatgaggatgatcagcgccggagccttgagaaaatgatatggccggagcgctcaaaatagaccgcagtcgcgtcggtacatacggctgaacggtctgactacgttgtccgtccttccaaaagccgtaccggcaaatacgtttccagcggcaaatcatcaaattcgccttcaatttcttttgctaaaatctcgatggctgttttggaaatcaattcgatcggctgctggatggttgtcaagtccggcagaaccgattgaacggtttcagtgccgtcataaccgatcacttttaattgattcgggaggtctttcccccgttttttagcctcggtcatcacggcagccgccatgatatcatcgctggcaaaaattccgtcggtgtcaggctgttcatcgaataatgttgaaataatatcatggtaatgctgataaaagggtacttcatatgtaataggcttccgtccgtgttcatgcatgacgtcttcgtatgcttttcttctgaggtttgccggtgtttcgagttcaatcgggccgttgagatggacgatgtgccggcaccctttttcaatcagcagttcagccgccttttttccgccgtcatagttgtctgagccgacgacgggaatcgtgtccgataagtaatgatcaatggcgacaatcggcagattctgcttgtgataattgagaattccccggttataagtcacggcgatcacgccgtccacttggtttcttatcagcatctccaaatatttttcttccttatcctttcgatgtaaactgttgcaaagcagcagtttgtagcccatggacgtacaaatgctttcaatatgaaaggcgagttcgccgaaaaacgggttgctggagtttgggatgataagtcctattaaattggttcgttttcggaataaagagcgggccagatcgtttggaaagtaattgatttcttccatcgccttgtacactttttcttttgttttttcgctgatatagccgcggttatttaatacccgcgaaacggttgtagatgaaactcccgctattttcgcaacatcatgaatgttaggcttcattcccgtgccctcctgcatactgaaatggcttacaatttccgtcacgcacttattttagagaatcaggctgacatgtgcaaggacattccatgtttctgttttcatataaagagggtgcgttttgtttgattggaataatcagaaaatcatatgtcaaccgattgacatatgaaaccggttgacatacaattctttttgaaagcgctttatttacggagtgaagggaagtgacgggtatggagagatggctggcggcaataaagtgaaagaatcaagcagcggcggaaagtaagcgcttactcggagctcgcatgtatgtgatgaatatgaagaaggaagtatgcggctcaaaatgactattaaaaggtcctattaaaggagcggtgcaaatgaaaagctcaaaaagtctgtattggaaactgagtgcttatttcttctttttcttttttacttggtcttccagctattctttatttgcgatttggttagggcaggaaatcaatttaaacggatcagcgacaggcattatcttttctgtaaacgccgtatttgccctgtgcatgcagcctctttacggttttatctctgacaaattggggctgaagaaaaagatattgtttatgatcagctgtcttctcatattcacgggtccgttttatatctacgtctatgggccgcttttacaatacaacgtctttcttggcgccgttgtcggaggcttatatttgggagccgcttttttggcgggaataggcgcgattgaaacgtacattgaaaaggtcagccgtaagtatgatttcgagtatggaaaatcaagaatgtggggctcgctgggctgggcggcggctgcattttttgcagggcagcttttcaatatcaatcccaatatcaacttctggatcgcgtctgtttcagccgtcatattaacggccattatcatgtccgtgaaaatagaaatgaccgatcatgagaaaaacagagcggaatcggtccggttaaaagatgtggggcggctctttttattaaaagatttctggttttttatgatgtacattatcggggtgacttgcatttacggcgtttatgatcagcagttcccgatctactatgcgtctttgtttccttcagtgtcgatgggtaaccaagtattcggctatctgaattcattccaggtgtttttggaggccggcatgatgtttcttgcgccttttatcgtcaataagttcggagcgaaaaacagtttgattttagcggggtttttaatggctttccgcatcgtcgggtccggaattgcagttgagcctgtaggcatttcatcaatgaaactcatccacgcactggaattgccgattatgctgatcgccgtttttaaatatttggccgccaattttgatacgcgtctgtcgtccgtcctttatctcgtcggttttcaattcgcatctcaggcaggcgcgtcgattctgtcgccgcttgcgggaggattatatgacagtgcggggttccgtcaaacctatctcatcatgggattcgtcgtctttggttttaccgtcatctccatatttactttattgggcccgaaacaaaacagcaggcgtgtccagcgtctgcaaaaaatcggatagagaggatgttacaaatggacagaattcagcaggcggaagaagctttgaaggaagccgagggtaaagtgaaacaaagatatcgattggggtatcatattatgccgcgggcgaattggatcaatgatccgaacgggcttattcagtttaaaggagaataccacgtcttttttcagcatcatccgtatgatgagcattgggggccgatgcattggggacatgtaaaaagtaaagatctcattcattgggagcacctgccggttgccttagctccgggggacgaattcgatcaaagcggctgtttttcgggaagcgcggtcgatgatcatggaagattagcccttatctatacaggacataatataattgatcaagagaaagacctattctatcagactcaaaatatcgctgtcagccaagatggaaccgtgtttgaaaagcttcaggaaaaccctgttattacggaaccgccggaagacagcgcccgtcatttccgcgatccgaaagtatggaagcatcgcgatgtttggtatatggtcatcggcaactcttcaaaagaaaacgtcggacgggtcgttttataccgttcacctgatttgcgtgattgggaatacgcgggggttctcgcccaaagtgacggtaatctcggttatatgtgggaatgtcctgatttctttgaattaggcggcaaacatgtcctgctgatttcgccccagggtatcgaggcggacggcgattcatataacaatttacatcaaaccggctatttaatcggtgactataataatgaaacaaacaaatttacacacggcgcttttaaagaactggatcacggccatgacttttacgccgtgcaaacattattagatgataaaggacgcagaattgccatcggctggatggatatgtgggaatctgagatgccgacaaaagcggacggatggtgcggtgcactgactttgccgcgggaactgactttgcgtgatgatcataaacttttgatgaatcccgtggaagaaaccaagcagctgcggaaaatggaatatcgggaatgtgccggacgatcggtttcagggagttacttggcaaagacgcccgaagacctgcttgaagtccgagccgtgtttgatgtaaacgattctgatgccgaaacggcaggttttaagattcgcggccttgacgaagaagaacttgtgctgacatacaatctaacggataaaaagctgacacttgattgcaccaagatggggaaagacggtgtgagaagggtgcggctggatgcaaacggcaagctggcgctgcgtatctttattgacagatcctcgattgaagtattcgccaatcatggagaaacaacgatgacaagccgtatctatccgaatgaaggcagattggggattgagctgttttctgagaaaggcgccgtaaaggttgaggaattcacctattggacgttaaaggacatttggaaaaaaagctgaaacgggtgattatcgctttttctgaagcggctggaaatgtaccgagccgagggcagtccgcctgaaatacattttttgtgaaaatcaatgccgttaaacgatgcaggattatgcagcgtcctcgtgcagcataatcctgttgtgtataatcaaaaaagagttgctttctgtgcgtttctttattataatataaaggtatctgattgaaaaaacgtgcgctcgtagctcagttggatagagcggtggtttccggtaccacgtctgtcgggggttcgaatccctccgagcgcgtctcagttaagacgataggaaaaacctcgcagatgataaatctgcgaggtttttattttatcttgttttgaaactgttaatgaatgtgtctctgttatgttcggtgccggcaatcagccgcgcactttcactgatccgctgcgcaagagctttttgcgccttgccttcaaagctgttcaatagtgctgaatacacttcatataattcatctttcaatgtgtccatttcgaatgtcggtttcagcgtttggcgcactgtttccagttttgtccccgctgcctgcgtcatggcggttttcagcatctgccgctgcagccttttcttcatcgggtcgtccttgtgttctaaaagttcgtctaatgtcggcattatgtatccacctctatcatcttaaccagtttgcgagcatctggtctttttcctgaaattcgtccgctattttatgtaagaatccgccgatctcttcaaggtccgtgatcgccgcctgcaaagaatcaataaacgcctgctcagcctgtgtgtcgtaaaaaatcggtcctttatcgtaggattgcgcaatatcttcaattgtattggtcacgtcctgtgcttgaagctgatcaaacaagccgtgtccgacttggccgtaaaattccgttttcagctcggcgattttttcatcgtgctcctgataggcgttctgcgcttcttttttcatcgtccgcaaatcctcagtcatggcctgcaccttttcagccagcttctttgcgtttttcggcgttacttttatcgcgtctccgcttccgatcgcaccggccggcagaagagcgccgagatttttatcgaagactaactcatctccgttcggatttgtgatgtttccgtttcggtcaaatatgaaattcgcttcatttaagccgtgtgtatccggatttctcagaatgacggtagtaaagaaataagcgagatttttgccgatctgctcgttcaagttcccatcaagccgctgcttccggctgaactgtgagagtgaggggtttttcgtataaatcgttgtcccgttgtggcggtcatattcgttccaataacccgccccgaccatgtcgtccggattgataattgaccggatgtaaggatcgtatatgccgctgttgatgtctttctgtgtttcctcatcgtgcagtttcacgacggaagggctgttaaacgcgacggcgtacacatcattattcaccgcgctgtattcggcctcagcgccgccgagtgaatggccggttgttgaaataatcgttgatgttccggcatactttttctttacgctgcgtaccagctgatcggcttgatcgatttgcgatgttttcgttatcagcttatactttccggttgtgagcatggcgtcttgagagggcgttccattatattttccgagtgttttcgaggtatcctccgcgtctttttttacaatataatacacttctttttgcggatcattaccgaaaacaatattgccgccgtccgcttttacgccgtcattgatcgggtcttttccgatatcggttcccgcaaaagcgacgaccacgttttcggggttttttgattttatccattttccgtttttggacttgatgccttttgagaatacaaaggcatcaagacccgtatcagaatcctgcttcactttctcaacgtaccaatatgacgtcttacttattttataaggagttttatatttcatatgcagggctaacattttataattgtaagctgcttgactcaaacggtaatattctttatctgtgacatcagagacggttatttcttttccttttggcatatatacatcacctttcttatattgtaaaatagttccgaaaggatgatacgcatgagaaaatacattattatcctaattgttataattatagcagtgggaggttttttcgtgaagcatcaatatgataaacataaaaacgaagaaaaacttgtgattgaggcgcaagatcatatgaggaattacttaaaaaaagactataaaaatgtacaggaagttcacttttcaaaagactacaatatcgatccgacaggcggagttgaagtttcaggctacataaataataataaagaaaaagaattttccggtatatatgatccaacgaacaaggagataggtatttcagtggtcaatgccgaagaaaggtaaaatacccacctcaggatgagtgggtatttattttgtttaattatcttacaaaattcgtgatatgtttctcatacagttcaaacctattcctgagatcaatcgcctctaccgtctcatttgtcgaggtatccccgatattaacggtaaacgcgtacaaatatcatgacaactcaacgacaggaaaacgtcagatcagcattttactcgctttaagttccaatcttaacttgtcagcaacaatcgcgatgaattctgaattggttagctttgcttttgacatgctgaaagtatattcatatcaagttttcgctcatttcgtttacttaagaacgacagttatttataggaagggtttgatttccaaatgaaaaagaaaaagtacataattatccttattttaataattatagcagttgggggactttttatgaagcatcagtatgatcagaaggaaaaagagattgcgttattcgaagaagcccagaatcatatggaaaagtttttaacaatgaactataaaaatgtggataatatccatttttccgatgattaccatattaatccaatgggtggtattagtattaagggttatacgaatggaaaaaaagagtttgaaggtctatatgatccaggcaataaagaaatattatcatatacggttgatgccgaacccaaagaagaatgtaaagataagctttgtacaagataaattagccagctcaatcgagctgagctaattttgttttattgctcttactctatctcctcgacataaaacaaatcttccataggtacatttaatcctcagttaataatgaatagtgttgtgatatcatatcttgtatttgttttaaatctgcttatcgcagcctcagtagaaccaactaaatcagccaattccttctggatttgaattcctttctccttcatcacttcatttaacctagatctaactataactaacgcttataaaaaagtattctcgatcactgatacttgatacgttgatgttttttagacatgtacaacaccccgaggttgatataaatttaatctaagaaaggatgagtttgtgaagagatgcaaaattgccctaatatttgtgataactatagcgtcaggaagtatctacatgaagtaccaccatgattaaaaagaagcagaacaagaactttttatccaagcgaaaaataaaatggaaagttatataaaagctaattacaaaaatataaagcggattacatacattaacaattataaaataaatcctatgggtggtatttccttgaaggggtacttgaatggtaataaggaaaaagaatttttcggactttatgacaaaacgaatgatgaaataggagtttcgtcagtcgatgcagaagagaaacccgaatgtcaggaaaaagaatgtgaatactaaaaagacgctggaataaagaagtactctggattgccgcttatatgatcctctgcggacattaaagaaaaatcttaagaccctaaatgcatcggatgtcaccaccatttttccattccgcgagcttcatcataactgatgggacggatgattctgtgaaaaaatatattattatcttcattatcttaatagcagccggaggttttataatgaagagtatgaatgataaaaatgttcaggctgaagagataaagattgctcaagaacgaatggagaaatttatcaaagcgaattatgaaggcatacataacgttacatttaaagataaatatgaaacagatccaatgggcgggatagaggtatttggctattacaacgatgatacatcaaataaatttgacggtatttatgataaagcaaatgacaagattatgggacacactatagatgctgtgagaaagaaagaatgcagagataaagattgtgattactaagaagacgctcgtctgcgtttttttatagatgagcttaatgaaaaagacaagggtttcggcatgtgccgcccttgtcttttttattgaacactgtaaaacataaccggaaacagctcattatttgacagtccattttaacagcgttacaattaatcatgtaaatagttacatgtttaaacaaacatattgtctcgggaggtgatacgtccttgaatgaaccttctttaaaaaagtcatttatgagtcagtgaaacgcatcattgatcccgagcacgtgtatttccgcactgtgcctgtgtttgaaacaagcaatgaggcatatcagcatctgcaggaccggctgtttatcggggctgcggtcagattgccggatgacattcggttagatatttatgaaattcaataataagatggagagtgagtcaacatggaaaactttatcggaagccatatgatttacacgtatgaaaacggctgggagtatgaaatctatattaaaaatgatcatacgatcgactatcggattcatagcggaatggtaggcggccgttgggtgcgcgaccaggaagtgaatatcgtcaagctgacagaaggcgtatacaaagtgtcatggactgaaccgacaggcacagacgtttccttaaactttatgccgaatgaaaaacggatgcacggaattattttcttcccgaaatgggtgcatgagcatccggaaatcacggtgtgctaccaaaatgattacattgacgtgatgaaagagtcacgtgagaaatatgaaacgtacccgaaatatgtcgttcccgagtttgcggatattacgtatcttaacaatgcgggaatcaataacgaaacattgatttcagaagcgccatacgaaggaatgaccgatgatatccgtgcgggaaaattaaaataagagaaaaaacccggcagcttggccgggttttttgtatccttttacgagagggttttggtcatgataaagtcgacttgtttatcatcccccatataaaaagagtgttctccggtttggacaaaccccattttttgataaaaggcgattgcattttcgtttttttcccatacgcccagccagatgttctttttattgtgtgctgttgcgattttcacagcttcattcagcagatatttgccaagcccgtgtttctgatggctttttcttatataaattctctcaatctcaagagaatcttcccccattttttctgactgtgcttcgttcatgttgacttttacataccccgcaaggtcatgatgataataaacaaaatagaattgagaagacggattggataattcctttttcagctgttcagagcggaatgcattttccaaataagctttcatattttcaggtgaattttgatctttaaatgtatcattgaatgtttcaatgcttatctcccggagctctgttatatcgttaaggctgcacttttttaatttaatactcagggtcatacagctcctttcttcatttatcataccagctgaattttgttgtatttgcaatgaaaataccgtatagtaaacataccgtaattttgttgtatttgcaacataaaataagaaaatgaggacgataaagtgaaatatgttttttatgttttaggaatcatgatcttgacctttggtatttctgtcacgattcaatcagatcttggaacatcgccttttgatgcgcttattgtgggattgtccgtccatgcagggcttaccgtgggaagctgggaaatcatcatcgctttcctgttaatttgctgtaattcaatgttaaaaaggcaaagaccggaattttcagggatgattacggcgttcataacgggaatcgggattgatatgtggcttttttttctgcatcgagtcataacgcctgaactatggtacggaaaggcgggctgttttgcaatcggtttagttgtgatagggataggaaccgcaacctatctgcacacaaatttcgcaccgatcccggttgatcggttaacgctaattgtccgtgatttaaccgggagaagcatctttttttcaagaacggtcatttacttcatatttttcatactggccttgatgctaaaaggtccggtaggcatcggaacgttattaaccgtttgtttaggcgggatcttccttcatttctttatgccgattaccggaagatggatagacggcatattaacagcatctccaaagcaggaaaaaacgaaaacccggtaacggcggtttttacccgattctatcatttttcatttcacccgcatgtttaaggtataataaaaaagggggagggatttttatgagcggtcaaagaaagctcgttttttacggagctgtcagcgcagatggctatcttgcgcgggaaaatcattctttagattggttaatcggaactgaaggtgaagacagcaccgattatgaagctttctatgaatctgtcgatacgatcattatgggcagaaaaacatacgaggaaatattggttttattgcctgaggaatttccgtacaaaggtaaagaatgctatgtgttttcgcggacattgaccgggcgtactgaacatgtgcggtttattcatgaagagcctgccgattttataaatgcattgaaacgccaagaaggcaagcggatttggattgtcggcgggagtgatctgctgcacccggttttggaggaaaaacttgtcgatgagtttatcattcagatcgcccccgttctgctcggccgcggaatttctttgtttaaacccggagaccgggagacaggactgaagctgactgatgtcaggcgttacaaacaatttgcggagttgcattatgaagtgagataaaatgaaatgtatgaacgaaacccagtaaaggttaccgggtttctttttcatgtttgtttttatgttttgaaatggtgtgggccggaccgcatgaaaatcctgcaaccatgataacaacccctatccacctcacggcatagaaatcagtgtcgcgcaggaagataaatgaaactaagataataagcgccccgattataacggcagctgtgccgataatacttgatttctccatatagaaactcctttatgaatgtttggttaacgtattgggttggaatataacatatcaggggtaatgcggaaatggatatgctgcgaagctgactgatgtctgtaagatgaaaatgaaacgccaagggagccggctcccttggcgttttttatgcttgaaacaggatgcggcgttttgctgaatcgggatcactttcgacagcggtatccgtgttgaaaagcaaagtttcgcgtgaatcggtttcatattcaggccaattgaagtgagaggtgttcgggtttccggtttttgcaaaagcgagccatgcggattgaatttgtttggaaagctgttctgcgtcatcaccgagcggctcttgcagcgtctttctcaaagaatcaaagtttccgaacacaaacggcaattccagagcgtgaacggctttatgaaacggcggtgtttcgccatgccaatcaaagcggtacatccagaccggtgcgtgttgcgactgtccttgtgcgaaagcgacagccggccgccagaaaatcagatccgtcatcatatcgatttgtccctttaatgaatgcggatataaatctgccgcttgctcggtgcagttttctccgaggtgataatgcaaataatcttgctgctttttctcggagtgaatgtctgtatcaggggtgaaaaacaaatatgcttcatcacgattggttccgatgatcataggtatgccttctgcggccccgtctgctatggctttcaccggttccgcaggcaatgtggccggatcgatggcgggctgaaacaaaagctgaaaaatgttttgatccagtgagcgccgcactttatccgcagtcttaagcaggtcattaacggaaagctcctgcaattgatcagtgccggcttcatgaataaatgccgccgcgatgtcttttgccatatccgccggcatcgtatgagaggcgccgctttctaaaatggctttatgaaacaggccttttgcgtcaggcattgccataagcgcagcgatgctcatgccgcctgccgattcaccaaatatcgtgacgttatccgggtctcctccaaattcggagatattgtccctcacccagcgcagcgcggcgatctgatcgagcagcccgatattggcggaatacgcgtcatgaatagaagacaaatgtaaaaagcctaacggtccgagcctgtaattgagtgtcacgacaatgacatctccgtcagcggcaagggcagatccgtcgtaaagcggttcgcttccggcacctaaataaaatgccccgccgtgtatccataccatgacaggctttttttcgccctctgaatcgggggcgaaaacgttgaggtaaaggcaatcttcagattgaggcggtatatctccggaaaacgatatggacagcatatcatccggctgcggacaaatcggcccgaacgaatcggcatgttttatgccgtcccaaggtgcgggcggctccggcgctttaaatctcagctctccgacgggcggcttcgcgtacggtatgcccttccatgtgcgggcaccgcggccggcagttcctttcagtgcgccgcagcgggtttgaacggtaagttttgtcatgatttcatccccttttttcttttcattataaacagagatgaaggcatgaagcgaataaaagccctttcatcagcatatcatcagtaacgcttccgttctaaaaatgatctgacttcctgaacggacaagccgagttcttttgcttcctgcatcagcgctttccattcttcaatgttggattcagtcagttttctgttacggtaggatgcgggctccgggcgcttttcagtcagtttgttcgtaaaggtgaacagttcttctttcggcatgcccgactgcacggcctgcacaaggtggatgcgccactcatcttccgtgcctcccatgtgatgcagcatcgtttcggcatcaaaaagctccgtcagatcgacctgcagggtggcggatacttttttcagaaattggatggacggatttgagtgaaccccccgttctatcttgcttaaataagatttagagacacctgcttcaactgctagctgattaatagagtagccttttcttctgcggtataaacgaattattcttccaatcattgtgctgaattctcccctgtatactggcatttttttgttcattataagaaatttttcgttctttataaaatttaaaattataagggaagtgcagtaaataagaggaaaatcatgataatgttctctaaaaagaactaaatggcttaatttgaaattttcaaatttcgaccttttcttttataatccaatcattaacagaagggggcgtttaagcctgatgcaataaggatgaggctgtaattacatgaatgagaatatgagttttaaagagttatttgacattattaaacacagatttttactgatttttatcatgacagcagttgtaacgctgatgacgggatacatccaattccgggtgatttcgcccgtttatcaggcatcgacccaagtgctcattcatgaaacaagcggtgaaaaaaattcgaatctcagcgacgttcagctgaatcttcattacaacaatacgtttcaaacgataatgaaaagcccggttgtgcttgagaaagtgaaacagaagctgcatctttctgagacggcatccgctttaaaagcaaagatcacgacaagcagcgaaaccgattcagagatcattaacgcagcggtgcaggacgagaacccgaaacaggccgccgctatagcgaacacgctgatgaagacatttaaaaaagaagtccgtgacaggatgaatataaaaggcgtcattgttttgtccgaggcaaaagcatcggaaagcccgatggtcaagccttcgcgcatcaggaatatcatgatggcgttcggtgcggctctcatggcgggtgtgacgcttgcgttttttctccactttcttgatgaaaccgttaaaagcgagcggcagctcagcgaaaaaacagacttgcctgttttaggggttgtgtatgacatcaaaaatcagcagacacggtctgatgaaaaacatttcggggagtgaggcgtttgggattcagaaaaaagaaatcaagaaggggactggctcaaatatccgttttacatcacaaatcattggtggctgaacaatatcgcaccattcggacaaatattgagttctcctctgttcagacccatttgcgctctattctcgtcacttcctccgttccgggagaaggaaagtcattcagcgccgccaaccttgccgcggtatttgcgcagcaggaaaaaaaggtgctgcttgtcgatgccgatttacgaaaaccgacgatacacgagacctatcagcttgaaaatgtacaaggccttacgaatgtgttagtcggaaacgcttccctcggcgaaacggtgcaaaaaacgctgattgataacctttacgtcttaacgagcgggccgacgccgccgaatccggccgagcttttatcttcaaaggcgatgggagagctgattcaggagatgtacagccggtacagtctggttattttcgattcacctccgcttttggcggtggcggacggccagattttagcgaaccagacagatggaagcgttctcgtcgtcttgagcggaaaaacgaaaatggataccgtccaaaaggcgaaagacgcgctccagcagtcaaaggcaaagcttttgggggcgctgctgaataaaaagaaaatcaaaaaaacagagcactactcgtattgagcggtgcaggtgatgtctccttacctttatcaacggaggcactcggctctgctgtgggcggcgttttccgccgccttagatgctggtcgtcggtggcggggtgtgaggacgggttaaatgcccaatttatcttaagatgatgcattgttatcggcttagctgttatgtctgtttttacgaaaaccgtatcagctaaaccgataaatgaggaggggaaagattgacttaccggagaagactttcaatgatttttgcattggatacgtatctcgttttactttccgttgttataggatatcaattttttgaggattcttatcacttttatgactccggagcgttgctgctgaccgccgtgaccatgctgatcagccatcatgtatgcgcttttatgtttcaccagtataagcaggtatggacgtatacgggaattggcgagctgcttgatctgctgaaggggatcacgctgtccgcagctgtcacagccgccgtccaatacggggtgttccacacgattttgttccggctgttagccgtcagctggatggttcagctattgttcatcggaggaagccggatgatttcgcgcgtgctgaaagaaacgatcggcaggaagcaaaatgactcttcccgggcgctgatcatcggcgcaggcgcgggaggaacgctgctcgtccgtcagcttacgcagaaaaatgatctcggaatcatgcctgtggcttttattgatgatgatcagacgaagcataagctcaaaatcatgggcctgcccgtcatcggcggaaaagaaagcattatgccggcggtgcaaaggctgagaattcaccacatcatcatcgccattccgtctctttgcacccatgagctccagacgctgtacaaagaatgtgtgcagacgggcgcccatattaaaatcatgccgcaatttgatgagatcctgctcggaacgcaggctgccggacacatcagggatgtgaaagccgaagatctcctcggcagaaagccggtcacccttgatacgagcaaaatttctgacagcatcaaagggaaaacgattctggtcacgggcgccggcggctctatcggttctgaaatctgccgccagatcagctcgtttcttccgcatgaaatcgtccttctcggccacggggagaacagcatttattcggtgcataacgaactgtccgcacgcttcggcaaagaggtgctttttcacgcggagatcgccgatattcaggacagagataaaatctttacgttgatgaaaaaatacgagccgcacgtcgtctatcatgcggccgcccataaacatgtgccgttaatggaacataatccggaagaagccgtcaaaaacaatattatcggcacgaaaaatgtcgccgaagccgccgatatgtgcggaacggaaacattcgtgctgatttcttctgacaaagcggtcaatccggccaatgtcatgggcgcgacgaagcggtttgcggaaatggtcatcatgaacctcggaaaggtcagcaacaccaaattcgccgccgtccgtttcgggaatgtgctcggaagccgcggcagcgtcattccgattttcaaaaagcagattgaaaaaggcggacccgtcaccgtcacgcatccggcgatgacaagatattttatgacgatccccgaagcgtcaagactcgtcattcaggcgggggcgcttgcaaaagggcggcagattttcgttctggatatgggagaacccgtcaaaatcgtcgacttggcaaaaaacctgattcatttatcaggctatacgacagaacagattcctattgaattctccggcatccgcccgggagaaaagatgtatgaagaactgctgaatcataatgaagtacatacggaacagatttttccgaaaatccatatcgggaaagcgatcgacggggattgggccgtgctcatccgttttatggaggaattcagccgtctgcctgaagatgagctgagaaaacggctgtttgaggcgatcgaatcagtacatgaagaagcggccgcaggtgtgtgatgggaggacagaaagatgacgaaaaaagtattattctgcgccactgtcgattatcattttaaagcctttcatcttccgtattttcaatggtttcaggatatgggctgggaggtgcacgtcgcggcaggcggcaatatgaatcttccattcgttgatgaaaagttttccattccgatccggcgctcgccgtttcatcccgaaaatctttctgtttacaggcggctgaaacggctcattcaggctaacggctacgacatgattcactgtcatacgccggtcggcggcgtgcttgcacgccttgcggcgagacaagcgcgccaaaaagggacaaaggtgctgtacaccgcgcacggctttcacttctgcgatggagcgcccctgaaaaattggcttctttattacccgatcgaaaaatttctctcttcttacacggattgtttgattacgattaatgaagaggattacgaacgggccaagcaaatgaaaaaaacagcttgcggcgcgaagaaaatacacggcatcggcgtgaatacagacaggtttcgccctgtgagccgggcagagagtgaacgtctgagagaaaaacacggcttcggcgccggggaatttatcctcatataccccgctgaattaaacggcaataaaaaccagggacttctcattgaggctgcggcactgctgaagaaccgcattccggagctgaaactcgtatttgccggagaaggcgcgatggaagagccgtacagaaaaaaggctgaatcactcggggtatccgacattgtgcggttttacggtttttgccgtgacattcatgagctgattcagcttgccgatctgtccgtcgcctcaagcatccgcgaagggctcggcatgaatctgcttgaggggatggctgccgaaaagcccgccgttgccgcagacaacagggggcaccgtgagatcatcgaagacggtgtgaacggttttctcgtgccggcaggggacagcgcggcatttgccgatcggattgaaaagctgtaccgatccccgggtctgcgaaaagcaatgggacaagaagggcgcaggacggcggaatttttttcagaaacacgtacggtaaaggaaatggcgcacatttacgccggttatatggataaaaaggagaaaagcgtatgaatgcaggagcacaaccgaaaatttccgttatcatgggaatttataattgcgaagagactttagcggagagtattgaatccatcctgagccaatcgtataagaattgggaactgattatgtgtgatgacgcgtcaactgacggaacgtatcagattgcgcgccgttacgcggatcattacagcgaccggatcacgctgattcaaaataagacgaatcaacggcttgccgcttcgctgaaccgctgtctgacatacgcaacgggggattatatcgccaggcaggacggtgatgacatctccaacccgaggagactggaaaaacaggccgctttcttaaacaagcacgcccactatcaagtcgtgggcacggggatgctcgtatttgatgaattcggcgtcaggggcgcccggcttttgccgcccgtgccgaaaccgggaattatggcgaaaggcacaccgttctgccacggcaccattatgatgcgggctgaagcgtacaaagcgcttggaggctaccggtcagtcaggcggacgcggcggatggaggatatcgatttgtggctgcgcttttttgaagcgggtttccgagggtacaatctccaggaaacgctgtataaagtaagagaggacagtgatgcgttcaaaaggagatcgtttacgtattccattgataatgcggtgctcgtttttcaggcatgcagacggctgaagctgccgatttcccattacgcgtatatcgcaaaaccgctcatccgcgccattacgccgcccgcggtcatgaaccgttatcataaaaacagggacatccgccaaaaagaagggcttgccgaacatgactgacaaaccgatgcgggtgctgcacatcttcagcgggatgaacaggggcggcgcagaaacgatgatgatgaatttgtaccggaagatggacagaacgaaggtgcagtttgattttttaacccataggaacgatccgtgcgcttatgacgaggaaattctcgctctcggcggacggcttttttatgtgccgagcatcggcagcacaaacccgattacatttgttaaacaggtcaagcgggtgattcaggaaaaaggcccgtttgccgccgtgcacgcccataccgattttcagtcgggatttatcgcgcttgccgctcgtttagccggcgtcccggtgcggatctgccattcgcacagtacgtcgtggcgggggcgggcgtcgcggcttgccgggatgcagctgtttgttttcagacggctgatcacggcaaacgccacggcactgtgcgcctgcggaaaagaggcgggccgtttcttattcgggaaagaaaaagacgtgcatcttttgccgaacggcattgatctcgacttatttgccggcgggtgcgcggacacagaagctgaaaaaaggaagcggggcattgcagacggccgtttggtgatcggccatatcggccgctttacagaagaaaaaaaccacgaatttctgctccggctggccgctgatatgaaagagcggggcatcggcttacagctgattctcgccggagacggtccgcttcgcaccgatatggaaaatctggcggcgaagctggggcttgatgatgatgtgcgttttatcggcatagaagaccgcgttcatgatctgctgaaaacgctggatgtatttgtcatgccgtctctttatgaagggctgcccgtcacgctcgttgaagcgcaggcctccggggtgccgtgcgtgatatcagacggcataacggaagaagccgatgccgggctcgggctggtcaaaaggctcagcctcaaagaaccgccgggacaatgggcatccgcggttttacgggcagcagaggcggcaaagcctgacggggcgcgtattaaagaaaccctcaggcggctgggatatgacgcgggagaaaatgcgggggctgttatgaagctttacaatatgaattggaaaaaggaacagtaacgaatgattgtatatgtagtcaatatgggaattgtttatatttggtcatggttcgcgaaaatgtgcggcgggcgtgatcaatcgctttcgaccggataccggccgaatcagctcgtcatgctcgttccgctgctatcgctggtattggtctccggtttgcgctacagagtcgggacggattttcagacgtacgcgctaatgtacaagctggcgggaaattacggcagcatttgggagatcttcgggttcggagcgaaaaaagcagccgttgatccggggtttacggctctcatctggctcatgaattttatcacgaaagatccgcaaatcatgtatttcaccgtggcggtcgtgacatgcagctttattttaaaggggctcgttgagttcggccgtccgtttgagctgagtgtatttttgtttttgggcacgtatcactattacgcttcctttaacgggatcaggcagtatatggtggcggccgttttgttttgggccgtccgctacgtgatcagcggaagctggaagcgttatatgtcaatcgtgctgctgtgttcgctttttcattcctcagcgctgattatgattccggtttattttctcgtcagaaaaagagcctggtcgcccgcgattttcggactgtcggcattgtttcttcttatgacgtttctgtatcagaagttcatttcgctgtttgtcgtcgtgctggaaaacagctcgtacggccattatgagaaatggctgatgacgaatacgaacgggatgaacgtcgtgaaaatcgcggtgctgctgctgccgctgtttttggctttctgctaccgggagcggctgcggaagctctggcctgacattgatgtcatcgtgaatttctgtctgctcggcctgctcttcggtcttttggcgacaaaggatgttatttttgcccggtttaatatatatttcggcctgtaccaaatgatcctgatcccttattttgtgaggatttttgatgaaaaatcaaatgcgctgatttatatcgccattattgtctgttattttctttacagttacttgcttatgccggtcgattcgtctgtgcttccgtacagaacgattttttcccggtaatggacactggaggtttatatggaaacacccgcggtcagtttattaattgctgtgtataatacggaaacttatttagaaagatgcttagattcattgctcaatcagtcgctcgccaatatcgaaatcgtggccgttaatgacgggtcaacggatcaaagcccggcgattcttgaaacctatcagaagcgggatgagagaatcagggtcgttcatcagcaaaaccgggggctcggcgcggtccgcaacaagggcatcgaggcggcgcgcggcgaatttatcgcttttattgatgcggacgactgggttgaacctgattattgcctgcgcatgtatgaaaaagcgaaggctgatcaggctgatctcgtgatttgcgaatatgcggctgaatttgcggatacggggaagaccgccgtttcaacgatcgcttcagcgtacgagggccgcccgaaacaacggtacctgaaagatttatttgaaggaagagtcagcggcttttcatggaacaagctgtacaaaagatccatgatcgagcatcatcagctgcgctttccgcttcgtgatgagctggagcacgtggaggatcagtatttcagcctcagggcgcatgttttcgcaggtgcggtctcgtacgtggatcagccgctctatcattatcggattcacttgacttccattgtgcaaagctatcagaaaaagctgtttgactcaggtctcgttctctatcggctgaacgaggcttttttgcgtgaaaacggctgcttacacgaataccggcaggagctggattttttcatcgttcagcacggaacagtctgcctgctgaatgaatggaagcggaataacggcggccggttttctgagaagtggaagaatatcagccggatatgcgctgatcccgtattccgcatgagcctttccaaaacgggaacggcgccgtttgacgccaaacgctcatgccttctgcttttggcgaagctgaagctgattccgttcgtgtcgctggcatcagccgcgtatcagcgggcaatcgagtacaaaatgaaaatcagagggtgaagacatgtcgatacaatctttaaaaatcaatctcgcggaatggcttttgcttaaggtcaaatacccgtcccaatttcatttcggaacgggagcggatggggcggcggggcttacagcggcaagaaaaaagatcattctgacgctgctcccgtcccacgataatctcggcgatcacgccatcgcctacgcaagcaaaacgtttcttgaacgggagtatcccgattttgacattgtcgaggtggatatgaaggatatatacagatcggcaaaagtgctgatcaaaaagcgccaccccgatgatatggtattcatcatcggcggcgggaacatgggggatttgtaccggtatgaggaatggacgcgccgctttatcataaaaacattccggcaatatcggatcgttcagcttccggcgacggctcacttttctgaatcaaaaaagggacggaaggaactgaagcgcgcccgaaaagtgtacaatgcgcatcccgaccttttgttgatggcgagagatgagacgacgtatcaatggatgaagcgtcattttcccggaaaaacagtgctcaaacagcctgacatggtcttatatttggataaaagcgagcggggcatagcgcgggaagggatctacctctgtttacgggaggataaggagagcgcgctgacggctgaggacagaacgatggtaaaagaagctttggccaaagagtacggagagctgtattcctttaccacgacggtcggccggagggtcagccgccatacacgcgaaaaggagctggaagcgctttggaatacgctgaaaggcgcggaagccgtcgtcactgacaggcttcacgggatgattttttgtgcgctgacgaaaacgccttgtgtcgtcattcgttcgtttgatcataaggtgatggaaggctatcaatggctgaaaaacataccgaacatgacattgcttgaacgtcccgaccctgaagccgtaacatccgccgtaaatcggctgctcagcggcaagcatgaggaaggcggttctttgcgaagtgtttattttgccgggctgcgctcgaaaatcagcggtgatgcccaatgaccgcgccgcttgtgagcgtgatcgtgccgatgtataagacagagccttttattaaagaatgcgcggtttctttaacaaaacagacgctgaggaacatcgaaatcattttcgtcaatgacggttcaccggatcagtcaggccggatggctgaacaattcgccgcagaagatgcgagaatccgggtgattcataaagaaaacggcggcctcagctcggcccgcaatgccggaataaaagccgcccgcggccgttatatcggttttgcggacggcgatgattatgtgacggaaacaatgttcgagcggctttatgaagaagcggagaagaaccggctggatatcgccggctgcggttattacaaagaaacgccgtctaaagaaagaacgtatatgccgccgtcccttccgccgggccgcgtcttcacagcggatgaaatgaccgcattgctgacccgcgcgcacgaacatcggtttatttggtatgtgtggcgctatatataccggcgagaagcattgcaagggctgttgttccatgaagatatccggtttgccgaggactctccgtttaacttggcagcgttccgccaagccgcgcgtgtcaaagtgatagacgaagggctgtatatctaccgggaaaatccgcaaagtcttacagaaacaccgtttaagccccgcttagatcacgaactgcaaaagcaatatgcagcgaaaatggctttttatgaggcaaacgggctgacggacgcctgccggagcgatattgatacatatttgtgcaagcatcagattccgatgctgatcgccaacgcatgcgccgccccgcagccgtcacaccagattacggcgcatatcggcagaatcttaacgtatgacatggtaaaaacggccgtgcgcaggacgccgtgccgccataaacagctgctggccggggagcgcgtggtgctcggtctgtgcaaaatgcgccttcctcttcttctgcatgcgtttttcgaacggaaatcgaaagagaaaggcagtgcggaaggagcatgaaatttgccattaatttcggcgccaatgtgacggcgtttttactatcggtgtttttatcagtgtggatgacgccctttattgtgaaaacattaggtgttgaggcttttgggtttgtccatctgacacagaatatcattaactatttctctattattaccgttgcgctgagctcagtcgttgtgaggtttttctccgtcgccgcccacagggggaacagggacgaggccaatgcgtatgtaagcaattatttagccgcgtctgtcgtgatatctctattactcgctgtgccgctcgccgggactgctttttttattgacaggattatgaatgtaccggccgggctcttaacggatgtgaggctgtctatcgtaatcggcagcgtgctgtttatgctgacgttttttatggcggggttcgcgacggggccgttttttgccaacaagctttatatcacaagttccattcaggccgtgcaaatgctggtcagggtgctgtgtgtgctcgctctgtttacgtgcctgccgccgaagatctggcagatccagctttcggcattagcgggagccgtctgtgcagctgtgctgacttttttcttctttaagaaattgattccgtggttttctttcagccgtaaaactttatcattacagacaagcaaagtgctgttttcggccggtgcctggagttctgtcaaccagatcggcgtgctgctgtttctgcagattgacctcatgacggccaaccttgtgctggggccgtctgaagcgggtgtctatgcggcgattattcaattcccgcttctgctcagaagtcttgccgggacgcttgcttcactgtttgcgccggttttgacttcctattattcaaaaggcgatatggaaggtctcctgtcttacgccaataaggccgtgcggatgaacgggcttctcctcgcgcttcccgccgcgttattaggagggcttgccgaaccgtttctggcgatttggctgggcccgtcgtttgtgcagacggcgccgcttttatatattcacgccgcgtatttggtggtcagtctctctgtcatgccgcttttttacgtatggacggcttttaataaacaaaaaacgcccgccgtcgttactttatgtttaggcggactgaatgtcatattggccgtggttctcagcggaccggcacatctcgggctgtacggcatcaccattgccggggctgtctccctcattttgaaaaatgccgtcttcacgccgctgtatgtttcgcatattaccggctttcagaaaaccgcgttttacaaaggcatgttcggcccgttggcggcggccgtatttgcctgggccgtctgccggggtatccggctgttttcaccgcttgacggctgggccggtctgatcgccgcggggcttgccgtatgcataagctatgccgcattcgcttttttcttcatttgtacgaaagaagaaaggcggcttgctttacagaaatgccgaaaagtgaaaggagctgttcagatttgaaggtgaaacgtgtatttgatatagcggccgcgacgctgttattgtgcggcgcgagtgtcattcttctcttcgccatggcagccgtcagatgcgccatcgggtctccggtattgttcaaacagacgagaccggggcataacgggcgtccgtttacgttgtataaactcagaacgatgacggatgcgcgtgatgaaaacggtgtgctgcttccggatcatctgcgcctgaccaaaacgggaaggctgatcagaaaactgagcatcgacgagcttccccagctttttaatgtgctcaaaggcgatatcagtctggtcggcccccgccctttgctgatggattatctgccgctttacacggcggagcaggcgcggcggcacgaggtgaagccggggattacgggctgggcgcaggtcaatgggagaaacgcgatttcatgggaggagaaattcaagctcgacgtgtggtacgtcgacaaccgcacctttcttctcgacttaaagattctgcttttaacagtgaaaaaagttctcgtgtcagaaggcatacaccaagccggccatgtgacggcaaagcgcttcacaggcagcggagatatgtcatcgtgaaaaaggtcgtgctgatcggaaacggcggacacggaaaagtcgtgaaggaaatcgtgcaggcccgttccgatatggagcttgcgggcatattggacgacggattcagcggttttaccgctcggaacggtttatatacgggccggacggaagacgtgcacatgcttcggaaactcgtccccgaggccgtgttcacgatatgcatcggccgcaacggcgtcagaaagcagttcgctgaaacgcttgggattgaagctgccgattatgcttcactcattcaccccggggcgatcgtcagtgaaacggcttccgtcggacacggaacggttgtgatggcgggcgccgtcattcaggcgggcgctgacatcggcgcccattgcatcatcaatacgggggcggttgccgatcacgacaatgcaatcggagattacgtccatctttcaccgcgcgcggcgcttgccggcggagtgaaagtcggggaaggaacgcacatcggaatcggcgcgtccgtcataccgcagatggacatcggcccttggtccgttatcggcgcgggggctgcggtcatcagcagaattcccggccatgtgacggcggtcggcgttccggcccgcgtcatctcccctatccataatgaaaaaggatgatttcatgcaaacaaacaaacggatttatttgtctccgcctcatatgagcggaaaagaacaggaatacatcgcagaagccttccgaaccaattggattgccccgctcggtccgctcgtcaattcgtttgaagcgcggctcgcggaatatgcgggagtgaaaagcgcggcggccttaagctcgggaacggccgccatccatcttgccctgcggcttgcgggtgtgaaaaaaggagacgttgtattttgtccttcctttacgtttgtcgccacggcgaatccgattgtgtatgagcaggctgagcccgtttttattgattcggaatgggagacgtggaatatgtcgcccgctgcgcttgagcgggcgctccgggatgcaaagcggcgcggcagactcccgaaagcggtgatcgccgtcaatctttacggccaaagcgcgaaaatggatgaattaatgagcctttgtgacgcatacggcgtctgtctgattgaagacgctgccgagtccttaggatcaacatataaaggcaggcagagcggcacgttcggccgtttcggcatttattcctttaacggcaacaaaatcattacaacatcgggaggcggcatgctcgtgtctgacgatgaagccgcgattgaaaaagcgaggtttcttgcgtcacaggcgagagatgccgccgttcattaccagcacagcgagctcggttacaactacaggctcagcaacattctcgcgggcgtggggatatcgcagctggaagtgcttgaagatcgcgtccgggcgaggagagaaatctttcaccggtatcgggaagcgctcgaaacatatccgggcatccgcatgatgccggagcttgaaggaacggtttcaaaccgctggctgacggctctgacgcttgataacggcgtgacgccggaagaagccgtcgcctgtcttgcggaacagaatattgaggcccggccgctgtggaaaccgctgcacacgcagccgcttttctcatcttccgtcttttatcctcacagcgaccatgagcgtgtctctgagaaccttttcagccgagggatttgtctgccgtccgggtctgacctgtcttctgaggagcagcagcgtgtcattgacgcacttgcgcaactgtttgaaacgaaaggggagaaaacatggacagccgccatgttatgagccgattaaaagagacgctgacgggtctgctcagcgttataccgccgcaatccgacatcatatatgccgactatcccctctacggaaatgtaggggatttattgattatgaaagggacggaggcgttttttaaagcgcacggcatccgcgtgaaacagcgctggaatcccgacaattttccattcgggcgccgggcggacaaaaagacgatcatcgtctgtcagggtggcggaaatttcggggatctctatccgtactatcagacgttcagggaaaaaatcgtcaaatcctttccggaaaacaggatcgtcatcctgccgcaatcgatttattatcaggatgagacacggctgcaaaagacatcggcgctttttgcggagcacaaggatctccacctgtttacgagagatcatgtgtcatacgagactgcgaaacgctttttttcggcgaatcatatcgggcttatgcctgatatggcccatcagctgtatccgatcgcggcgtcagcggttccgtcacgcggcaggctttattttatccgcacggatggggaaatcaacccgaagctgcaaaacaattcttccgttaaaagctgtgactggcaggatgttctgtcagcaagcgaccgcaggggaatcgcttttttccaaacgctgaatgttttgaataaaaaagcgggaaacccgctgccgattgcgcggttttggaaccgctattccgatttcttaacgaaaaaagcggtcctgtttttcagcaggtacgaatcggtggaaacgtcaaggctccacggccacatcctgtcctcgcttctcgggaaaccgaataccgtcattgataattcatacgggaaaaacgcgaactattattacacctggacgcacgaagcgccggacgtccggctgatcggtgaaaccgccggcacgaaggaaaaccttccgctttgaatgagcggaaggtttattttgtttctccgcgttttactttgttgtacgcctcatccaaatgctgaattcttttgagcacaaccgagtttttcgtcagctgatcctgtacaagggttgagacgacggagcggtaatagctgttcatcgcatgaattcggtcttcattcggattcatttcaatgtgctgtgtaaagttttcaataaaatagggaacagaaaaaagttctgacatctataaagcaactccttttaataagtatatacggtatgaaaccaatcatgtacaatgaaaaaaggggagtgagcatgatggatatcaaacttcagcaaacacaaatgttaaagcctcaattaacgcaagagcttaaacaggccatcacattactcggatacaattccgcggaactggccggatatattgatgagctctcactggaaaaccctctgattgaacgaaaggaaacagacacgccgccactatcttaccataaaacaaataaaaacaggatgaaagaacgggacggaagccagcagatcagacttacccgcaaaacgctgcaggattcgctcaaacagcaagccttagacatgaagctgtccgatgatgagaaaaaaattttcaattatctgatacattcattggattcaaacggttatttaaaagaggacataccagccgccgccgaccatgtatccgcttcacaagaggagacggaagcggttctgaaaaagcttcaatcccttgagcccgcgggaatcggcgcccggtctttgcaggaatgcatccttcttcagctccgccgtctgcccgagcggaacgaacaggcggaatggattgccgaagcctattttgagctatttgcaagaaagaattggaaagcgcttacacttaaaacgggcattccgcttaaagacattcaggacatcgctgacatgatcagcgcgcttgatccgaggccggggctccgttatgcgcatgaggagccgggtttttacgtagaaccggatattttcatcacggtgaaaaacggcatcattcaagcgcggctcaacagccgttcgtttcctgacatccagcttcatgcccattatcagccgctcttgtcagccgccgggtgccgtgacacgaaaaattatctgtcggcaaaatatcaggaatggcgctggctgaaccgggctttgtcgcaaagaaaacaaacgatcacgagaattatcggcgtcctgactgaacggcaggaatccttttttctcacaggaaaaagcggaatgcagccgctgaccttaagagaggtggcggaaacgctggagctccacgaatcaacgatcagccgggccatcaaagggaagtacgttcagacgccgtacggactgtatgaaatgaaaacatttttctcggcgaaagctgaatcatcgggggacggcggcgcctccaattatgccgtaaaagcgcatctggaagcattggtccgtaaagaagataaaaagaaacctttttcagaccaaaagcttgccgatctgctgcatgaacaatatgacatccgaatctcaaggcgcaccgtcgccaaataccgtgaccaattaaatattccgccgtcatcggcgagaaaacggtacagctgaaacctccccgagccaaaccccggggaggttctccgtgttacgggatcatccatgaaaacagatgatgctgtaaaaatgtaatgagacagacgagcagaagcaaaaacagactgtgcttaatcgtaaagcggaaaaggtcggcttccttgcccgccagaccgacagcggcacaggcaaccgcaatggattgcggagaaatcatttttccggtgacaccgcctgatgaattggcggcaacggagagaaccgggtccatcccgacagatagcgccgtcaccttttgcaatccgccgaacaataggttggccgatgtatcagagccggtaataaatacgccgagccagccgagcaccggcgaaaaaaaggtaaacatcgcgcccgtcatggcaagcgcaagaccgagtgtcgtgctcatgccggaagcattcgtcacatatgcaaagccgacaacagaaacaatggtcacgaccggaagcgttaactctttcaccgtttctataaacgcttcgccccacgtcttccacgacatgccgagggcgaacttggagatgacggcggcaatcagaatcgccgttcccgctgaaccgaaaagctcaagtttgtacacggcttcaatcggcgtgccgtccgcctgaagaatctgctgatttacaaatgggacgggaggcgtgaaggtcaatgctttcccggctgcattcagccaggaaagccacattgacgttccttcataatgaccggttaaagcagccttcacgccgggaatcccccaaacggatatcatggccgtcagaagaaggaaaggagaccacgctttaaacaccgcggcgcccccgtacttgatcggcgcccggtcagcggccgctgctgattcccgttctgccgcgaaacgaaaggccgttttcggtttccaaaatttcaaaaatacagcgagcgcggccatggaaacaagcgccgacagcacatccggaagctcaggccctaaaaaattcgagcttgcgtactgcacggccgcaaaggagacgccggaaacaagaatggccggccatacttcaaaagcctttttaaacccgctcatcaaaatgattaagtaaagcggaataaagacggataaaaaaggaagctgccggccgaccatttgggaaatttccattgccggtatcccggtcggaccttcgacggcggtaatcggaatgccgatcgcaccgaaggcaacgggcgccgtattggcaatcaggcaaattcccgccgcatacagcggctgaaaaccaagtccgacgagcaaagcggccgagatcgcgacgggagcgccgaaaccggcggcgccttctaaaaatgccccgaatgaaaaggcgatgagcagcgcctgcaaacgccggtcatctgtaattgagagcaccgaactccggataatctcaaactgtcccgttttcacggtgattttatacagaaagaccgatgtgacgataatccagccgatcggaagcagcccgtacaccgctccctgagaagcggacatcaccgctttttccgccggcatgccgtaaacaaatacagcgattaaaagtgaaacggctaacgttaaaagccccgctatgtaccccttcatccgtttcaccgcaagcgcccaaaaaaagaagataatcggcacgagcgcgcaagctgccgataaaagcaaatttccccctaaaggagcgtacccctgtgtccattgcatccctaaaaaacccctccttatgtcatgtaaacgattactttttatgataaggtcatctgatgaccgggttaattagcattatattttgaaagttttgaaagtacaatacttttcttgaacaaattgtctgaacctgtcggctacacaaaaaaagaagtataatagacgataaacatcaagattcacaagtgacggggtgatcgcgttgaaatataaacaaattaaaacgaaaaaaatctacgaggaagtcgctgacgcattgctggagaagataaaagcgggcgagcttaagccgggggaaaagcttgattctgttcaggcgctttccgagagttttcaggtcagccgctcggcggtcagagaagcgctgtcggctttgaaagcgatggggctcgtcgacatgaagcagggagaaggcacatacataagagaatttgagccgtctcatgtttcccagccgctttcttccgccctcttgatgaaaaaagaggacgtcaaacagctgctcgaagtcagaaagctgcttgaactcggcgtcgccgccatggccgctgaaaaacgcaccgaagacgatttacaaaaaatccgccaagctctcatggagatgaaagacattgacggagacgaagaattgggcgaaaaagcagatttctcctttcacatggcgctggcggaagcatcacaaaacgggctgcttaagcatctcatgaatcatgtctccgcgctccttttggaaacaatgagagaaacgagaaaaatttggctgttttctaaacgaacgagcgtgcagcgattgtatgaagagcatgaacgcatttacagcgccgtcgccgccggagacacggatgaagcggaagcagcgatgacggcgcacctgacgaatgtggaagaagtgctgggggcttattttgaagaaaatgtatagaagctgacttgtgaaaggggataacatcacatgcaggccgaatcttttttttctgaccatgtaaagaaagctctgacaaatgatcctcccggggaatggatgccggcagttccgaaagcgtgcatccctctgcattccggctatcccgatcccgcgctcgttcctgataaggagctgaaagaagccgcctcccgccttctggatgaggagcgtgatctgccgctgcattatataggaagcccgaggacggccgttttaaaaaagcagattcaagaacggttagccatccgcggcattcactgccgggacgatgagctgatcgtgacatcaggcgcctgtcaggcgatagatctggctgcgcgggttttcctcgatgaacaaaccgccgctgccgttgaagctccggtctatatggaagcgctcgagatttttaaaaattatacaccgcatatcatgagcattccgacagatcaagagggtctgcaaacagaaacattagcgtttatgcttgaggaaagaaaacgaaaagggcttgtgcttccccgtcttctctacacgatacccgcttttcagaatccggcgggaaccgtaatgtcatcgaagcggagaacccgcctgcttcagcttgccgaaacgtatgattttctcatcttggaggatgatgcatacggcgagctcggattcaccgatattccgccgcccttgaaagccatggatcaaaacggccgggtgctgtacgccggttcattatcaaaagtcatcgccccgggtatgaggatcggctggattgcaggggacgccgcattcatcacggcattgtcatggttaaaaaaagacttaggccatccgttttcccaagcggtgaccgccgtctatctggaacaaacgaatattgaagaacggctcgccgccttgcgggaagcatatcgaagcaaacgtgatgttttgctcgccgcatcagcgcgatatcttccggaatccgcatcctggcacgtgcctgaaggcggttactttgtatgggtgaaagcgccgggggctgatacgtccgcactgctggcgagggctctgtctcacggcgtttcctatgtacccggaaaatatttttttccgcatcaggaagacggtgccgaatatctccgcctgtcgttcagttttcccggtaaagccgcgataaaagagggtgtgcaaaaactgggacacctgctgaaaaacgggatctagagaagcatgggaagctttcaggcttctcttttttttacccttcagcgcatcgggcgaaaggatttttcagaaaaaccttccaatccatattcagaatagtgtaggatatttatagagctttccaaaaacaggtcatcagatgaccggatcacatactgaggatgaaagaggggttcatcatgaaagtctcattatttgtcacgtgccttgtggatatgtttcagaccaatgtcggaaaggcgacggttgaggtgctggaacggctcgggtgtgaggtggattttcccgaggggcagatttgctgcgggcagcccgcatacaacagcgggtatgtgacggatgcgaaaaaagcaatgaagcggatgattgccgcgtttgaagaagcggagtacgtcgtcagcccgtcaggttcctgtacgacgatgttccgtgaatatccgcatctgtttcaggacgatccgaagtgggccgcaaaagcgcagcagcttgcggacaaaacatatgagttaacggattttatcgtcaacgttctcggggtggaggatgtcggggcggtgctgcataaaaaagcgacagtccatacatcgtgccacatgacgaggctgctcggcgtgtcggaggagccgatgaagcttttgcgccatgtcaaggggctcgagctgaccgcgcttcccggaaaacaccaatgctgcggattcggaggaacattttctgtgaaaatggcgcaaatctctgaacaaatggtggatgaaaaggtcgcctgcgtggaagacacggaggccgaggtgctgatcggggcggattgcggatgtctgatgaatatcggcgggcgtcttgaccgtaaggataaaaacgtcagagtcatgcacatcgcagaagtgctgaacagcagataagacgagaaacaacaagggggtaaaatcatggcgatgaaaatcggtaccgccgcttttaaagagcgggtatcagaaggaatagataatgagtttatgagaggagccgtctccggagcgcaggaacggctcaggataaggaggcttcaggcggccgaggaattgggaaactgggaggattggcgttcacatgcggaagaaatcagacagcatgtgctggacaatcttgatttctatttggaacagctcgccgaaaacgtcgccaacagaggcgggcatgtctttttcgccgaaacggcggaagaagcgtcctcctatatccgcgatgtcatccggcagaaaaacgccaaaaaaatcgtaaaatccaaatccatggtgacagaagaaatcaatatgaacgaagtgcttgaggaagagggctgtgaagtcacagaaacggatctcggcgaatacattctccagattgacgatcacgatccgccgtcacatatcgttgctcccgctcttcacaaaaacaaagagcagatccgtgacgtgtttaaagagagactcgaatacaaacagacggaaaaaccggaagagctcgtcatgcacgcgcgcagcgttctccggaaaaaatttctcgaagcggatgtcggcatcacgggctgcaactttgcaatcgcggataccggatcggtcagtctcgtgacaaacgaaggaaacggccgccttgtgtccgcgctgccgaagacgcagatcaccgtgatgggaatggagcggatcgttccttcattttctgagtttgaagtgcttgtcagcatgctgacgagaagcgcggtcggccagcggcttacaagttacattacggcgctgacgggcccccggcagcaaggagaagctgacgggcctgaggaatttcatctcgtggttgtggataacgggcgttcccgcatactcggcacggaattccaatcggtgctgcaatgtatccgctgcgccgcctgcatcaacgtctgtcccgtgtaccggcatgtcggcggacactcgtacgggtccatctattcgggtccgatcggcgccgtcttatcgcctcttctcggcggatatgacgaatacaaggagctcccgtacgcatcttccttatgcgcggcctgtacggaagcgtgtccggttaaaattccgctgcacgagctgctgctcaagcatcggcagaacattgtggaaaaagagggcaaagcgccgatcagcgaaaaactggcgatgaaagccttcgggctcggctcgtcatccccgtccctttataaactgggatcgaaatgggcgcctgccgccatgacgccgtttacggaggatgacaaaatatcaaaagggccggggccgttaaaagaatggacggcaatacgggacttcccggcgccgcataaatcgagattcagagattggtttaaagaccgggaaaaacaaaagggggaagaatgatgatgaaagggacggttacacatcaggaatcctttctaaaccggatcgccggaagtctgggcagagagcgcaggaaatcaggcgtgtccctgcctgaatggaagtatcagcctcaatatcaaacgcatgcggactgtacggaagacgatcttgtcacgatgctgaaagaccactgcgtcaacattcataccgaactgatcgaaacggatgcagccgggctttacgacgctttgcgcacgcaggtgaaccgctttgaaggggggcctgtcatcattccgaacgacagccggtttgaaatgtacggcttgcagacccttatgacagaagagtggccggacgaagggattcccgtttgggaatgggacgcggaacaaggagcgaaaaatattgaaaaagcggaacaagcgaatgtgggcatcacattcagcgagatcacgcttgcggaatcagccaccgtcgttttgtatgcgtcagagcatgccggccgttccgtcagcctgcttccgaccacctatatcgcaatcatcccgaaatcttccattgtgccgagaatgacacaggccagcgatatactgaaacagcagatcagagacggcgtcaccgttccttcctgcatcaactatattaccggaccgagcaactcggccgatatcgaaatggatttggttgtcggcgtccacggacccgttaaagccgcttatatcctcgtgaatgaccgataaaaaaacaaaccccggtttgcggccggggtttgtttttatataaacgcgttaatgatcatgataaaacagatcgcactgacagaaataatcgtttccatcgccgtccatgtcaggaacgtttcttttaccgtcattccgaaatactctttaatgagccagaaaccggagtcattgacatgtgacagaatcaaagagcccgctcccgttgccaaaacgagaagctcgctgctgacgcccggcatgacagatgcaatcggagcaacaatgccggccgccgtcatcatggcgacagtcgctgaacctgtggcgacacggatgaccgccgcgatcgtccagcttaaaagaacgggagagaagcttgagtgcttcgccatgtcagcgatatacgtgccgacgcctgaatcaatcaggacgttgttaaaagcgccgccggctccgatcacaagcagaatggaagcgatcggtcccagacagtcattgctgaattttaaaatgctttccctgtcaaagccctgataaaaaccaaggctgaaaaaggagtaaaccgtggcgatcaaaagcgccgtgacagggtcgccgataaatttaaaagtttcatagagcgtgcttttttccggaagcgcaatttcggcaagcgttgccataagcatcaggatcaccggtaccaatatcgtaaacaatgtatttgcgaatcccggaagcttgcgtttttcattccgttcaataaattgttttttcaacagttcgggaacgggtttatgaatgcgcttaccaatccattttccgtaaagcggccccgcgatgatggcagtcggaataccgacgattaaagaatacaaaatcgtttttccgacattggcgtgataaatgccgacagccgccatcgccgccgggtggggcggaaccaatccgtgcacgacggaaagtcccgcaaggagcggaatcccgatcgtcactaatgaaaccccggtttcaatcgcaatcgtaaacaaaagcggcacgagcaggacgaagccgacctggaaaaagaccgggatgccgacaataaaagcgacggccatcatcgcccaatgcactttctttttgccgaagcggccgatcagggtgtgggcgatccgctccgcaccgcctgattcagccatcatttttccgagcatcgtaccgagggccagcacgatcgcaagcagagacagcgtattgccgagcccggttttcattgaagtgataatgtccggcagattcatgcccgttgcgaaaccgacaaggatggatgtaatcaaaagactgataaacggatttaatttagcgaccgtaatcaataagagtaaaacgataatagcggcaatgacaataaacagtaacatgaccttttcaccctttctttcaaagaagaattaacggctttgtttgagctgaaattcactgatgacgtcaaattcatctttgagcttgtcatacagccgctcgtataagtaaaacagctcaatatatgtttcgctgtttttgacgttcggttcatggcggtgcgaaattctgatccagtcctgaacatcctcgatccgttccatttcgccaaggctgtgcaaagcgagaacggccgctccgagcgcagaggcttcgtaactttccggaacgaggacttcgcgtcccatcgtatcggacaaaatctgcctccacagcggcgatctcgcaaatcctcccgaagcccgcacgtcttttgcggggcccgccaaatctctcagtgcgacaccgattgaaaagacgctcatgatgacgccttccagcaccgctctgataaaatgctcccgtttatggcggaggctgatgccgaaaaacgttccgcgggcattcgggttccaaaacggcgcgcgctcccctgataaaaacggcagaaacagcaatccctcagagcctgcgggcactttatcagcaatatcaatcattaaatcgtacggatcaatgccgagccgcttcgccgtttcaacttccggagaagcgaattcgtctcgaagccagcgcagcataatgcctccgttattcgtcgggcctccgatgacccaatgcttgtcagtcagcgcgtaacagaatgtccgcgctttttcatccgtaatcggcgcatccgtcaccgaacgcacggctccgcttgttccgatcgtaacggccacttcgcctttgccgatcgcgccgactcccaggttggcgagcacgccgtcatttgcgccgataataaacggtgtatccgcatggatgcccatccgtgcagcgatttccggcgcaaggccgcgcagctgatgagtggtcggcacaatgtccgacagctgatcttcccggattccggcaatcctgagcgcttcttcatcccaggaaagcgtatctaatcggaacagtcccgttgccgaagcgatcgaataatcgacgacataagttccgaaaaactcgtgcagaatatattctttaatactgatgaatttggcggttttcgcgaatgtctccttgtcctgttctttcatccacacaattttggaaagcggagacatcggatgaatcggcgtacccgttcttttataaatatcaaaaccgttcatctcttttaaaatccgttttgattgctcggcgctgcggttgtccgcccaaatgatgcttttggtcagcaggccgccgttttgatcgacagctatcaatgagtgcatggcggtgctgatgccgattgcaagcagattgtcaggactcagtccggcctttgtgacggcgcccctgatgcttccgatcaccgcttccaaaatgtgctcaggatcctgctcggcccatgccggctttggctgtattaaatcatagtgaaccgaatgcttggctaacactttgcctcttggtccgaacagaacagctttcgtactggtcgtgccgatatccagaccgataacagcttgggtttccttcataatatatcccgcctaatctgattgaataataagatagatttataatgtatgcccttacaaagtcaattataggaataatttttttataaatcaacgatgaagaagaaaaattttttcataaaattgcctcaattcccgctgtatcggctttctctcttttgaaaaaaatatttagaaaacgattacaaacgtttgtgcgcgatcatttttctgatttgctgcaagttggcgagcgttttctcctgccgcagccgggccgtggcgaaatacagtgtatcaatgaccgacagctgggcaagccttgcggacatcgcctccgttctgaaagccgtctcccttgttgatgtatacagcacaacgtcggaaatctgggtgagcggcgacttttggtagcttgtaatgccgatcgtgccggcgccgagcgatttggccgttttgaccgcgtcgagcacgtccttgttgctccccgaatgagaaatgccgatgactgcgctttcaggaccgagaagacccgctgacatcgcctgaaagtgagaatccgtatgcgcgatgcaatttatacccgtacgcataaatttatgatacgcgtcagtggcgatcagcccggaaccgccgtttccgtaaaattcgattctgtctgcgcggtggatcatttctaccgctttttcaacgtcggccggatctaataattgaaaggtatcggtcagaccggaaatgtttgtgcggaaaactttccggatgatgacttcgatatcgtcgtcggggctcatttcttcatgaatgtgctgcaccggctcctgaacgatctcctgagccagcgcgatttttaaatcctgatagccggaaaaaccgagccgcttgcacagcctgaaaatcgtcgcttcagagcttttcgttttttcggccagctgaatgatggaaaggtgaaccacgtctttcggttccttcacgatatggtctgcaatcgctctcaattttggcgacaaacctttgctggccgcctgaatcttcccgatgctgcttgaattcacaggggtcatactataacctccctactcgaatgtaaacgcatacttttatgataaagcaagtttcaatataaggaaaacagaattttaaaattgttttttcaattttgtgtgtaaaaaaagagaaaaagccgccgatgatagaaagtgaggaggcatctgaatgaaaaaagcatggattctcgtcatatcattcggcattgcgcttgcgctgtttttatacgcaaacacaaaggtgaaagcggaaagcatggcgccggaaagcaaagccttgtgtccggatttcagctgaaatttccgaatcaccgggaaggacaatagacggaaaaaattagtattgactttgaaaatagaagactgtatattatgttactatattcagaaaataaaaactcaagagattcatttaacataaaacactgtgaacgggagcagtaagagaatccagtcagaaaaagagagccgcgggttggtgaaacgcggactgattgttctttgaactcgcccggaagtggcagggcggaacggaattgtcggaatattccctatgtcctaacggctgaccttcgttaaaaggtttttaagctggattccggatattcgggatcaacaagagtggtaccgcggctgcctgaggcacgccgtctcttttcctaaagaggcggcgtgcttttttatgtgatgaacactttttgcgagagggcgtgtgatagatggaaaaggacaagcaaacgttaaaacggacgatgtcgtccagacacattatgatgatggcgcttggaggcgcaatcggggccgggctctttaaaggcagcagcacggcgattgatgaagcggggccgtccgtgctgttggcctacctcctcggcggaatcattctgctgtttattatgcaggggctggccgaaatggccgtcagaaacaaacatgcaaggacgttccgtgatttggttcagcagtctctcggttcgtacgctgcatactttttagactggatctattggaaaatgtgggtgctcaatattgccgcggaggcggtcgtagccgccattttcattcaatattggctgccggaatgtccgatatggatactggctttgatcatttccatcgtggtgacggtcgtaaacatgctttctgtgaaactgtttgccgagacggagtactggctcgcgctcattaaaattacggtgattgtcatctttattttatgcggaattctgctattatttttctcattcggcaatcacacggcgccggggctgtctcatttaacggatcacggagggtttttcccgcatggagcggggggcgtcattacggcgatgctcgtcgtgatctactcatacggcggaacggaaatcatcggcgtcacgctggcggagacaaaaaaccccgaaaaggtgattccgaaagctgtccgaagcacgttaacgcggattgtcgctttttacttgctgccgtttttcatcatcgtcagcctgattccttggaatcaagtcaacagcgttcccgaaagcccgtttgtcatagtatttaagatgatcggaattccgggtgccgaccatattatgaatgccgtcattcttcttgcgattatctcgtctatgaactcgggactgtacggatcatcccgcgtcttatttacgcaggcttctgacggccgggtgccgaaaatcttttcaaaactatcgaagaaaaaggttcctgtctatgcgattctgacttgtacgtcatttttatatgtaggcgtcctgatttctttattcgcaggaagccggacgtttaattatttgatgggttccctcggctataccgtgctgttcatctggctgattatcggattcgcccatttaaaatcaagaaaacattcaacagaacagccggcttattacgtcaaatggttcccgtacacgacatggttcgcggtgcttgcgcttttggccatcctgatcggcgtaattgcgacgacgtccatcgtcatcacatgcatcactgcggccatctacctgctcattacggctgcgtatctcgtgaaagggagacgtcaataaataaaaaaactcttgccccgcggcaagagtttttttaatgaacggcctttttttctgcggccagagcaggtgttttcagtttcttcggtgttatattcacaaaacaaatgcttgtgacgatcagaagcagtccggctaaaaggctgacggtcagcggctcatgcagaaatatcgagctgacgacaatggatatgagcgggatcaggaaggtgtaagaggcaaccttgcttgcttcccctgaaccgacaagcgtaaaaaaggcgagccagccgagtgcgatgacaaataccgaaatgaacagaaggctgagaatgaacggagttttccattgaatcgctgaaaagctttctgaaaaatggccggagctgacaagcagcacgccgccgatcagaagctgaagagcgaccatccagatagagtccgcgcgtccgcccgttcttttcacatataccgtgccgagcgcccagctgaccgcggagcccagagccaaaagaatgccggcgatggaaatatggcctccgaaaccggctgcgctgatgacggcgacaccggcaaagcccagaataagaccggctatttttaaaggatacatcgattccccgagccacagccaagaaaaaacgcccattaacaccggctggaaaaacacgatggctgaaaataagccggcatgcaggtaattcaagccgaccgtttgcaggccgtaaaataaagtaatatttaaaatggcagaaataagatagatcggccacgtttctttaaaacgcagctttttaaaacggggcagcgccaccattaataatagaagtccgccgatcagcgtgcggattccggcaaacagaagaggcggcgaataggcgagcgcggcttttgtcagcggccagttaattccccataccgtgactagaaacgccagcataagagccgtctgtattttcgaaagctgtttcacgtcgttcactccttgtagaacaattccatcatatgatacggtaatcagtaagataaataaaatgaatcttttttataaggagcataagtaaaacgttatgacgattacacaactgcgggtttttgttcaaatcgctgaaacgggaagctttacaaaagcggggcaggcgctgaatatgacacagcccgccgtaagccatgccatctcggcgcttgagtcagagctcggcatcaagctgatcatccgcgagcgccgcaacggcgtaaggctcacggacacgggcggaaaaattctcgttcatatcagagaggtgctcaaaggcatagaaaaagccgagcagctggcggccgcggaaagagggcttgaacagggaacgattcacatcggcacatttccggccgcttccgcttatttcattccaaaactgatcagcgtgtttaaaaaacggtatccgaaacttgagttggtgctttatgaaggaacggttaacgaagtaaaggaatggctccgctcccgggtaatagatgtggggatcactctttttcctacggaagacatggaatatctgccgctgaaaaaagataaaatggccgtcgtgcttagaaatgatcatccgctttgcagctgtgagtcaattactctgaaagatcttgaccgccagccgatgatcatctgtgacggaggatacgaatcaccgtttattgatatgtttaaggaggcagggtctgtgctgactgccgcattcactgtttacaacgtcaatacgtccatcagcatgatcaaagaggggctgggaattgcgatattatcacaaatgtctatgtccggaatatcactgccggaaaatgtcgtgacaagggaactcaatcaggcggtgtaccgtgatgttctgcttgccgttccttctgtaaaagaggcttcattggcggcaaaactttttattcaaatcgcgcaggagctcacaaagaatgaataaaaaggccctaatgatcttagggccctgaatcttatcggttaattttaaaagagtttgtcgtattgacaagttttgaaccgctgaacgtagctttgacacgataataacctgtcttgcatccttttaaagagaatgacttagtcacccttactgagaaagaaaaggttgtttttttgcaagtcgtccatttctttccggactttcgctgtaagtataggtttcctttaaaggttcgatctgacggatacgctgtactgagagtaaaatcgacacttttcgcttttttcgtgtagtaggaggcatcggtaaatccgcttacatttaaatgctgctgagtgccggaataaaagtctgcggcatatgccttatcggtgtttccggtaaagaagattgctgccagtaaagctgttgtgagtgccattaagatttttttacgcatatagactatgacttccttcctattcaatatatgacatatgttaacattattggttctgttctttcaatgatatcttttcatttttatatcattctaggctcttcatatctgaatgtaatagattcattcatacagagttcactagtgacgaccgctgactgattgttcgaagatcatcgaatcaaattgtttaactcacgggaaaagctgtggtaaggtgtgtggtagagaccttgtttaagatctgcttacactaaaccataaaggagaaaacgatggctgaacatacattgaaagatactgcgttttccgtattgaatttatcgccggtcgtacaggggggaacggttgctgaatcgttccgcaacagcatggatttagcgcaccgcgccgaggagtggggctataaccgctattggctggcggagcatcataatatagaaggtgtcgccagctcggcaacggcggtgctgatcggccacatcgccggcggcacgaaaaaaatccgcgtcggttctgggggcattatgctgccgaatcattcgtcacttataatcgcggagcaattcggaacccttgaaacgttatatccggggcggattgacctcggactcgggcgtgcgccgggtaccgaccaattaacggcgagggccttaagaagaaacataaacagcggggaggatttcccggagcagcttgaagaattgagaaattacttcaaaccctcaggcaatgtgcgcaatcaagtccgcgccattccgggcgaagggctggacgtgccgatctggcttttgggatcgagcggcttcagcgcgcgtcttgcgggagagctcgggcttccgttcgcctttgcggctcacttctcaccgaaaaacaccgtgcccgcccttgagctgtaccgaagctccttccgtccgtcagacgtactggatcaaccgtacgcgatggtcggcgtcaccgtcattgccgccgatacggatgaaaaggcggagcatctggcgacatcgcattatcaaagatttttagacctcgtccgcggcacgccgaaccagctgaagcctcctgttgaagacatggatcaaatctggtcgccgtatgaaaaagcgatggtcaatgaacagctcagttcaacgatcgtcggcggaccggagcgtgtgaaggaaaagctggaaagcttcatccggacaacacaggcggatgaaatcatggtgaattcagaaagctttgagcatgccgacagaatgagatcatttgagatcatcgccgaattaaaaaacagctgagcaaaaaaagcaatgtgccgcgcacattgctttttttattcgccgatccgcctgacggaatttcggatgacgagttccggttcatacacgacgtcatccttcttcggttttttatgctctaagcagccgatgacgtattttgccgccgctttccccataatggatttcggatgcttgacagaggtgagcttcacctcggaaatctgggcgaaatgtgaatcatcatagcccatgattgacacgtcatcaggcacctttaagccgaattctctgagaagattaatcgtcttcagcgcaatttcatcattataacaaagaatggccgtcgggtatgatccgctgttttgctcaagggtatgcttaattttttgaagaagcacggtttctttttcttcagtcgtgtaagtcacgatcatgtccggagacggaaaaatcccgcgctcccggtgcgcctgaagatagccgttcatccgtttgacgccctgcgtgtcatccgctttaaagattcccataatgtgcgtgtggccgagggacatgacgtattcgcaagccatcatgccgcctttgacatcattgacggaaaagctcggtgcggccagctccgcataagaggcgttaatcatggcaaacggaatgccgtttttctccaggttgagatagtagccgatgttgggcgtctgcagcgcgcttttcgtaggctcgacaatcagcccgtctatatttttggacagcaggttttcaaggccccgccgctcactttctgtattgttgttggtgctcgtcagcagcatggaatagccctgttcgcttaaataagattcaattcccctgatgatgctcgggaaaatatagtctgatatgtacgttgtaatgacaccgatcgttttgtttgaatgcatggctgatttcgccgtgcgtgaagcgacaaaggtgcctccgccctgaacgctgtacagcaacccctgcgagaccaaatctccgatcgcctttctgatggtatggcggctgaccccgaactgctgcatcagctcattttccgtaggcagcttttcgtccggctgtatttttccctgattcagccatgaacaaatttcttcttttacttgagcatatttcggtagcatatcaattcctccaaaatgtatacggacaaattccagtataacatagtaagccctttcatcaagctgtaaaaataattgacagattgtgaaaaactgcttattctttatttgtacgtactaattttccttatttttagataaaattctttataagtacgtacaaatgtggcggttctgaagaaaacaaagcaactcaagcgccgcactttgttttgtaagcgtttttattctattattcgcgggagggtaaaattcatgaagaatcacccggcaccaattggctcaaatgtacctgtcactcggcagcattcgaagtggtttgtcattctcatctcatgcgcggccggactgggagggcttttgtacggttatgatacggcggtgatttccggcgccatcggtttcctgaaagatttgtaccgcttaagtccttttatggaagggctcgtgatttcaagtattatgatcggcggtgttttcggcgtcggaatttccggatttttaagtgaccggttcggacggagaaagatattgatggcagcggcgctgttgtttgcggtgtcagcggttgtctctgcgctttctcaaagtgtgtcttccttagtgatcgccagagtcatcggcggtctgggaatcggcatgggctcctcgctttctgtcacgtatattaccgaagccgctccgccggccatacgcggcagtctttcctcactgtatcagctgtttacgatattagggatctccggcacttattttattaaccttgccgtccagcagtccggctcgtatgaatggggggtgcacaccggctggcggtggatgctcgcttacggcatgattccgtccgtcatcttttttatcgtgctgcttatcgtgccggaaagtccgcgctggcttgcgaaagcggggcgccggaatgaagccctcaccgtgctgacgcgcattaatggcgagcagaccgcgaaagaagaaatcaaacaaatcgaaacgtctttacaattagaaaaaatgggttcattgtctcagctgtttaaaccggggctgagaaaagcgcttgtgatcgggattctgctggctttattcaatcaggtcatcggcatgaacgcaattacgtattacgggccggaaattttcaaaatgatgggcttcggacaaaatgcggggtttatcacgacatgcatcgtcggtgtcgttgaagtgattttcaccattatcgcggttcttttagtcgataaggtaggccggaaaaagctgatgggggtcggatctgcctttatggcgctgttcatgatcttaatcggggcatccttttattttcagctggcgagcggtccggctttagtcgtcatcatattgggattcgtcgccgctttctgcgtatcagtcgggccgattacgtggatcatgatttcggaaatctttccgaaccacctccgcgcacgcgccgccggtattgcgacgatattcttatggggggccaactgggcgatcggccagttcgtgccgatgatgatcagcgggttggggctcgcgtacaccttctggatattcgccgtcattaatattctctgtttcttgtttgtcgtgacgatctgccccgagacgaaaaataaatcattagaagaaatagaaaaactctggataaaatgaaagcgttttacggcaaaagtccgctgcggcgggcttttgtctgtcaccttcattccgtttctgtatataatgactgtatcaaggagatactggtaaatcctgcgaagaatgtcgaggaattgacctttaacagttgaattaacaatgtcatcctgttaaaataattaaagaaagcagacataattttttttggctatgatgggacgttttttgtcatagcgggacattttctgtccagtatgaataggaaggaacgtttgagtcatgaaccagttaatacaagctcaaaaaaaattattgcctgatcttttgcttgtgatgcagaaaagatttgaaatcttgcagtatatcaggcttacagaaccgatcggccgcagaagtcttgcagccagtctcggattgaccgagcgcgttctcagaagcgaggttcagttcttaaaagaacaaaatctcatcgatattaaaacaaacggcatgacaatgacggaagagggctattcactgctttcgattctggaagatacgatgaaggatgttttaggattgacgcttttggaaaagacattaaaagagcggctcaatctgaaagacgccattatcgtttccggagacagcgaccaatctccttgggtcaaaaaagaattagggagagcggccgttgcatgtatgaaaaagagattttcaggcaaaaatatcgtcgctgtaaccggcggtacgacaattgaagccgtcgccgatatgatgacgccggattcaaaaaaccgcgagctcctgtttgtgcccgcaagaggcggtttaggcgaagatgtgaaaaaccaggcgaacaccatatgcgcgcatatggcggaaaaggcttcaggcacttaccggcttttgttcgttcccggccagctgtcacaaggcgcctactcatctattattgaagagccttccgtaaaagaggtgcttcacacgattaaatcagcgagtatgctcgttcacggaatcggcgaagctagaacaatggcggagcgaagaaacacgcctttggaagatttgaagaaaatagatgacaatcatgcggtgacagaggcattcggctactactttaatgcggacggagaagtcgttcacaaggtgcattcagtcggaatgcagctcgatgacctcgatgccattcccgacattatcgcggtagcgggcggatcatcaaaagcagaagcaatcgaagcttattttaaaaagcagcgaaacacggttctcgtcacggacgaaggagccgcaaagaagttattaagggataacagtccctcaatataaatatctctcacttatttaaaggaggaaataatcatggcagtaaaagtcggtattaacggttttggtcgtattggacgtaacgtattccgcgcagcattaaacaatcctgaagttgaggtagtagcagttaacgatttaacagacgctaacatgcttgctcatcttttacaatatgattccgtacacggaaaattagatgcagaagttaaagttgacggcagcaaccttgttgttaacggcaaaacaatcgaagtttctgctgagcgcgatcctgcgaaactcagctggggcaaacaaggcgttgaaatcgtagttgaatctactggtttcttcacaaaacgcgcagacgctgcgaaacacttagaagcaggcgcgaaaaaagttatcatctctgcacctgctaacgaagaagatatcacaatcgttatgggtgttaacgaagacaaatacgatgcggctaaccaccatgttatctctaacgcatcttgcacaacaaactgccttgcgccgtttgcaaaagtacttaacgacaaattcggcatcaaacgcggtatgatgacaactgttcactcttacacaaacgatcagcaaattcttgatcttccgcacaaagactaccgtcgtgcgcgtgcagcagctgaaaacatcattcctacatcaactggtgctgctaaagcagtttcccttgttcttcctgaactgaaaggcaaactgaacggcggagctatgcgtgtgccgactccaaacgtttctcttgttgacctagttgctgaacttaacaaagacgtaacggctgaagacgtaaacgcagctcttaaagaagcggctgaaggcgatcttaaaggaatcctcggctacagcgaagagccattagtatccggagactacaacggcaatgctaactcttctacaatcgatgctctttctacaatggttatggaaggcagcatggtaaaagtaatctcttggtacgataacgaaagcggctactctaaccgcgttgttgaccttgcagcttacatcgcaaaacaaggtctttaattcatagctcccggaaagggccggacttggttctttcggacagaaacgctataatgaaagcggacaagggaaggggacggactccctttccctttttccatgagaaccggctttcagaaagcgccggattgctgcagaacgtccgcgttttgaagtttccgcggcactttcgttttctgagccgcctgccctggctcagaagacgatctgccccgtgcccggaagctgcaatctgccccgcggcggaagcatcatgaggcggtttcacgtttcacgtttttcgtgctatgcaaaccattttgaaggaggatctcctaaggcatgaataaaaaaacagtaaaagacatcgacgtaaaaggcaaagtcgtattctgccgcgttgactttaacgttccaatgaaagacggggaagtaacagacgatactcgtatccgagctgcgcttccaacaatcaaacaccttgcagaccaaggcgcgaaagtccttcttgcgagccacttaggccgcccgaaaggcgaagtggttgaggagcttcgtttaactcctgtcgctgcacgcttaggcgaactgctcggaaaagaagtgaaaaaagcggatgaagcttacggcgatgctgtaaaagcacaaatttctgatatgaaggacggagacgttcttgtattggaaaacgtacgtttctaccctggtgaagagaaaaacgatcctgagcttgctaaagcatttgctgagcttgcggatgtatatgtcaatgacgcattcggtgctgcccaccgtgctcacgcatctacagccggaattgccgagcatctgccggcggttgcaggattcctgatggaaaaagagcttgacgttctcggcaaagccgtgacaaatcctgagcgcccgtttacggcaatcatcggcggcgcgaaagtaaaagacaaaatcggcgtaatcgaaagtctgcttgataaagtggacaacctgatcatcggcggaggtcttgcttacacattcgtaaaagcgcttggctatgaagtcggtaaatctcttcttgaagaagataaaatcgaacttgcaaaatcattcatggaccgcgcgaaagaaaaaggcgttaaattctatatgccggaagacgttctcgttgctgatgatttctctaacgatgcaaacgttcaaatcgtgccgatctctgagatcccaagtgatttagaagcgatcgacatcggaacgaaaacccgcgaaacgtacgctgaagttatcaaaaacagcaaacttgtcgtatggaacggacctatgggcgtattcgaaatcgacttgttcgctcaaggcacaaaagcagtggctgaagcattggcagaggcaaacgatacatactctgtcatcggcggaggagactctgcggcagccgttgaaaaattcggccttgctgacaaaatgagccatatctcaacaggcggcggcgcatcccttgaattcatggaaggcaaagagcttccgggtgtagctgcgctgaacgataaataaaaactgctataaggaagtggaacagatgagaaaaccaattatagccggtaactggaaaatgaacaaaacactcggcgaagctgtcagcttcgttgaagaagtgaaatcttccattccagcagcagacaaagcggaagccgttgtttgcgcaccagctcttttcttagaaaagctgacttctgctgttaaaggaactgacctgaaagtcggcgcccaaaacatgcattttgaagaaaacggtgcgttcacaggtgaaatcagcccggtcgctctgaaagaccttggcgtggattactgcgtcatcggccactctgagcgccgtgaaatgttcgctgaaactgatgaaacagttaacaaaaaagcgcatgccgctttcaaacacggcattgtgccgatcatttgcgtaggtgaaacgcttgaagagcgcgaagccggaaaaacaaatgatcttgttgccgatcaagtgaaaaaagggcttgcgggtctttctgaagagcaagttgctgcttccgttattgcgtacgagccaatctgggcaatcggaacaggcaaatcttctacagcgaaagatgcaaacgacgtctgcgcgcatatccgtaaagtcgttgctgaaagcttcagtcaggaaactgctgacaagctccgcattcaatacggcggcagcgtaaaacctgcaaatattaaagaatatatggcagagtccgatattgacggtgctttggtcggcggcgcaagccttgaaccgcagtcattcgttcaattattggaggaaggtcaatatgagtaaaaaaccagctgcactcatcattcttgatgggttcggattacgcaatgaaacagtcggaaacgcagtcgcacaagcgaaaaaaccgaatttcgaccgttattggaaccaataccctcatcagacgctgacggcatcaggcgaagcagtcggactgcctgaaggacagatggggaactctgaagtcggtcatttaaatatcggcgccggacgtattgtgtaccaaagcttaacacgcgtgaacgttgccatccgcgaaggcgaattcgaacgcaatcaaacgttccttgacgccatcaaaaacgcgaaagacaacgacaaagcgctgcacctgttcggccttctttctgacggaggcgtacacagtcacatcaatcatttattcgcgctgctgaaacttgcgaaaagtgaaggactgacgaaggtgtatattcacggtttcctcgacggccgcgatgtaggtccgcaaacggcgaaaacttacattcagcagctgaatgagcagatcgaagaaatcggtgtcggcgaaatcgccagcatttccggacgctactactccatggaccgcgacaaacgctgggaccgtgtggaaaaagcgtaccgcgcaatggcttacggcgaaggcccgtcttaccgcagcgcgatggatgtagtcgacgattcttatgcgaacggcattcatgatgaattcgtcattccgtccgtcatcacaaaagaaaacggtgaacccattgcgaaaattcatgacggcgattctgtgattttctataatttcagaccagaccgcgccatccagatttcaaacacgtttaccaacaaagatttccgcgatttcgaccgcggtgaaaatcatccgaaaaacctgtatttcgtctgcctgactcacttcagtgaatctgttgacggatatgtggcttttaaaccggtaaaccttgacaatacggtcggtgaagtattagcacagcacgggttaaaacagcttcgcattgcagaaactgaaaagtatccgcacgttacgttctttatgagcggcggccgcgaagaagaattcccgggcgaagagcgcatcctcattaactcgccgaaggtcgcgacatatgacctgaagcctgaaatgagcgcgtatgaagtgaaggatgctcttgtaaaagaaatcgcggctgacaagcacgacgcgatcatcctgaactttgcaaaccctgacatggtcggccactccggaatggtcgaaccgacgattaaagcaattgaagcagtggacgaatgcttaggcgaagtggttgacgccattatcgctaaaggcggtcatgccatcattaccgctgatcacggtaatgcggacattctgattacagaaacaggcgaaccgcacactgcccatacgacaaacccagtccctgtcattgtgacgaaagaaggcgtgacgctgcgcgaaggcggaatcctaggcgacctcgcaccaacgttattagaccttctcggtgttgaaaaaccgaaagaaatgaccggaacatctttaattcaaaaataagcgtaaatcaaaaggagagacaaactcatgccatacattgttgatgtttatgcacgcgaagtccttgactcccgcggcaacccgacagttgaagttgaagtatatacagaaacaggagctttcggccgcgcattagtgccaagcggagcttctacaggtgaatacgaagcggttgagcttcgtgacggcgacaaagaccgttaccttggaaaaggcgtgttaactgctgttaacaacgtaaacgaaatcattgctccagagcttctcggctttgacgtaactgaacaaaacgcaatcgatcagcttttaatcgagcttgacggtactgaaaacaaaggcaaactcggtgcgaacgcaatccttggcgtatctatggcttgtgcgcgcgcagctgctgatttcttacagattcctctttaccaataccttggaggattcaactcaaaaacgcttcctgtaccgatgatgaacatcgtaaacggcggagagcatgctgacaacaacgtagacattcaagaattcatgattatgcctgtaggcgcgcctaacttccgtgaagcgcttcgcatgggcgctcaaatcttccacagcctgaaatcagttctttctgctaaaggaatgaacacagctgtaggtgacgaaggcggattcgctccgaaccttggttctaacgaagaagcgcttcaaacaatcgttgaagcaatcgaaaaagccggcttcaaacctggcgaagaagtgaagcttgctatggatgctgcatcttctgagttctacaacaaagaagacggtaaataccatctgtctggcgaaggcgttgtgaaaacatctgctgaaatggttgactggtacgaagaaatggtttctaaatacccaatcatctctatcgaagacggacttgacgagaacgactgggaaggccacaaacttcttacagagcgtcttggcaaaaaagttcagcttgtcggtgacgaccttttcgttacaaacacgaaaaagcttgctgaaggtatcaaaaacggcgtaggcaactctatcctgatcaaagtaaaccaaatcggtacattgactgaaacattcgatgcgatcgaaatggcgaaacgcgcaggctacactgccgttatctctcaccgttccggtgaaactgaagacagcacaatcgctgacatcgctgtggcaactaatgcaggacaaatcaaaacaggtgctccgtcccgtacggaccgtgttgcgaaatacaaccagcttcttcgcatcgaagatcagttggctgaaactgctcaatatcacggtatcaactctttctataacttaaataagtaatgtaatggacgccgggagaatatctcccggcgtttttttatggtcccgggcttttccctcctttttcatcatcttcatttggtcaataatattcatttttcccctttttaaaggaatcagtgttcttcaatcgaaagggaagaggtgttaataagaggagggattatgatgaaattttcatttatgtcagccgcggtggcagcaagcgtcatatggggcgcgtctgccgggccgctgtccgaaactcatgcttattcaactgtgaccgcgccggtttttgatgctgatgaggcattggacactatgcatgatctgagtgaaaccatcggtccgcgggaaaccggaactgcgaaagaaaaggaagcggctgaatacatatcgaatcgtctgcgggctcagggcgccagtgtcaaagtacagtcatttccattgaaaaagtacttttcaggttcagtcacagcgggagatcatgaattcccgctccgctccgctgatcaatccgctgttgaaaaagagctcaaaatagaaggcgggatttttgacggcggctgcggatcacgcaatgacgtaacaggagccgaaggaaagattgcagtgatacgcgaaggaaagatccctgtttctcaaaagatcaaacatgccgaacaagcgggagccaaagcagtcattatttataatcagacaacaaaaccgctcgccgtccgtccgcataccgataaaggaatcacgataccggcggcgggtatgaaaaaagaagacggtgaagcattgcttcaggaaaagaaggcagtcattcaatttaaaaactataaaaaccgcacctcacaaaatattataggaacgcgcaaagcggcacaggccaactcttctgatgctgatattatttatgtcacagcgcattatgacagcgtaaaaggcgcgcccggagcggatgataacgcctcaggcacatctgccgttctggaaatcagcaagcaactcaaacatataccgaaagacaaagagatccgctttatcctgttcggtgcagaagaattatggtctgcgggttcatcttattacgtcagtacactcacgaacaatgaaagaaagcacagccgggccaattttaatgccgatatgattgcgactgactgggaagaagcgagtcaaatgtgtgtcacgactcctgacggcaggaaaaacccgagtgtccggtatgctgaaaaagccgctgaaaaatcccggttggtcaagccaaacctgattcagctcggttactcagaccatgtctctttttatgaagcggggattccgtcggctaactggatttggctcagccccgatacacaggagccggggccctggtaccacaccgaaaatgataatatgaaacacatcagcaaagaacggctagagaaagctggagcactcgtttccgcggcagtaactgaggcaatgaaggaataaaaaacaggcttcggcctgtttttttatattattttctgtatattctatcaattaagggagattttctcactcgttaccagatatataccatttaacaggattttattttacaaataaaagaaaaataaatagataatacctaattcacaaaaggatgtaaaactcatttatcaaattttaacttttgttataattgcgatatcgatcgatatttgttttaaattgtaaaaaacaatactcttttctatctattagggggcgaaaaatgaatactgtcacaaaagaagccagcaaccttggtcaaaaacggctgttacatctgattgaaacgaagcaggcgatagtaggcgtgttaggcatgggatatgtgggatttcctcttgcgctggaatgtgtcgataaaggatacaatgtgatcggatttgacaaaaacagtgaaaaggtttccttgttagccgccggaagcagccatattcaagatatagaggacggcagactgaactcggctttacaaacaaaacgctttcaaatcagtgccgacatgtcgctcatccaaaaatgcgacatcattgtgatatgtgtgccgacacccctgaacaaaaaagacaagatccccgatttaacctacatcgacagtgcagttgacagcatgatcgcttatggaaggcagcatcagcttttaattttagaaagcaccacctatcccggaacaacgaaaaaaaagattgccgacagaatggcatcaagccgcggcatgaaaataggaacagacttttttacggcttattctccggaaagaatcgatccgggcaacaggcaatatgaagtttcagatattcctaaagtagtcggcggaaccacacagacttgcacagaacttgcctcagcgttttacaacaccattgttacaagcattcacccggtcacctcacccgaagtagctgaaacagctaaactcctagagaatacttatcgttatgtcaatatagctcttatcaatgaaatggcgcttaattgccgtgaacttgatattgatatatgggaagtcatctgcgcggcggacacgaagccgttcggctttcaaaaatttatccctggccccggagtcggaggccattgtatcccgattgatcctttttacttcaaatggatcgcgaatgaaaaagggctgcagacaaaattaattgatctggcggacgaaatcaattctaacatgccgatttctgtctctgactatgctttgaaactggcgggcaaagacaaatgcagcatcttaataataggggccgcttataaaaaaaatacaaatgacccgcgtgaatcctcagtgtttacgataatggaagaattgatggacaagggatgcgcgattgattatcatgatccgtttatcagcgagatccgcttgaatgacggaagccgcaaacaatctgtccctttcacaaaagaacaaatcaatcagtacgacgtcatcatcattcatacagatcacgatgtaatcgactacagtattttgaaggatgcctcaccgattatctttgacacaagaaatgtatgcagggaaaaatcagccgacaattgcagagttgtcactttataggagggaacggtcattagtaatcgatttatctcttttcacagacctgatatgacaaacgaagaaatcgcaagcgtaaccgaaacgattcagtcgggctggatttcgaaaggcccgaaggtaatcgattttgaaaaaaagctgggagaatgtattggagccgaacacgtcatcagctgtaattcaggaaccgctgcattacacatggctttattggcgctcggtgtgggagaaggcgatgaagtcatcgtgccgagcttcacgttctgttccagcgtcaatgtcatcctgcacgccggagccgttcctgtgtttgcggatatatgcgagaaaagtctatgtgccgatcctgaagatgtcaggaagaaaataacgccgcgcacaaaagcggtaattgcggttcattttgccggctatccggctgatctggaaaacttgcagtccatttgtaaagaaaacggattgtatctgattgaagacgccgctcatgcgctcggtacaaaatataacggaagcatgatcggcactcacggcgatgccgtgtgcttcagcttttatgccaccaaaaatattacaacgggggaaggcggagccctcgtcatgaaagacgaacaggccgcagaaagagcgaggctgtacggctggcacggcatcacaaaaaatgcctggaaccggtacggtgaaaaaggcagctggagatacgacgtgttactgccgggctttaaatataatatgacggatattcaggccgcgctcggtctggttcaattgaagcgcgcaaacgaaattcaagaaaaacgggcacagatcgctcaattttatgtacgtgaactgtcgggccaatctgacaaagcagcgcttccgctttctgacattccgaacggcataacgcactcatggcatttatttattttgcggatccgagagaacggcggcatggacagagatctgtttattgagaaaatgaaagaaaaacagatcgggctgagcgtgcactttattcccgtgcatatgcatccttactatcaaaaacattttccggccgagctgccggttactgaacgtgttttccgggagatcgtgtcactgcctctttacagccagttatcagatgaggattgcagctatattgtcaagtctataaaagaagttttgactatcagccaggaggtaggatcatgaaacatattgcgattatcggaggagccggttttatcggaagcgaattggcggcattattacaggctaaaggttatcacaccattattgcagaccaaaaggagccggcttttgacactgaataccgccaaacggatatccttgatcggacgtccctccgcgaatcactgcggggagcggatgcggttgtccatttggcggcaatggtcggtgtagacagctgccgaagcaatgaagaagacgtcatacgggttaattttgaaggaacgaaaaatgtcaccgaggtatgcggtgaattgggaatcagaacacttcttttctcatcgagctcagaagtattcggagattcacctgattttccttataccgagacaagcagaaagcttccgaaatcggcttacggaaaagccaaactgcaatcagaggaatatttgagagaacaggcttccgacaagcttcatattcgggtcgtccggtactttaatgtatacgggccgaaacagcgcgaggattttgtcatcaacaagtttttcagcctggccgagaatggctctgagctgcctctttacggggacggcggacaaatacgctgcttcagctacatcagtgatatcgtcaccggaacttatctcgcgctcattcatgaaggagccgtctttgaagactttaatatcgggaacgaccagccgatcacgataaaagaactggctgaaaaagtcaatgtgctctctggcagagagaaggataactatctgtttaaaaagctgggcgaagacggcgtgaggggaaaagacatcgagatttttaaacgggcgccgtcaatcgagaaggcgaaacgtttactcggttacgatccaaaagtaagtctgaatgaaggcctggagatcataaaagatgaaagacaaaagcacaaactttcactttcctgaaaacccggaagtagtcaaatatcccgtttatcccggacagctttccgtcagggaccgtctgcgcgcggtgaagcacttgcttactggcggacaaagcggactgactgaaaaactggaaaaacggtacggaaaaggggttgtgctgacctccagcggcagtgcggcactggtgctcgccttaacttattcgggagccgggccggggaaagaagtgattttctcatccttcagctgcccgaatgtcattgatgccgtattgcaatccggtgcaacgcctgtttttgcgcagctggatgagcatctttctttatcgtttgaggatgtcaaaaaaagagcgacgcggcagacgtgtgcggttatcctcacgcacgtatacggccggagagaaaataccgccatcattgactgggcgaaggaacacggtatttttgtcattgatgatgccgctcaagccatgtttacaaaacaagcggatacatatgccggcggtctgggcgatttcggtgttttaagcttcggcccgtcaaaaccgcttgcgagtatcggaggcggcgcgttaatcgcgccgaaagaatggcttcggcaaaaagcaaatttcccgatggaacagcgcagccaagtggcagctgactatcgaatttatatcagaaatcaaagaatacaggctgttatgaaacggaaacggcatcatcccgtttcatatatttataggaaagcgggcatcatgccttccatgaaagccactaagctcgaagctctgccggataaaccggctgttgtaccggtgcttcgcatgcatccggcaagggaagccattattgaagatcagctttcacttatggatcagcttgtaacagcttcgctccgaaacttacaagcggcgggagaaatctttataaaggcggaagagacgtacggcataaagatgatccagccccaagaaggagaacatctgaattatttaacgattgtattcccccgggatgaagagcggtacgggtgttccgtttatttagctgaaagaggcatccaaacatgctggaactatcttcccctcggacgtattccgatttatgaaacatatgcggcggaagaaggggaagatccgctttggaaaagagttctttctctgccgtttaaacctcctcttcaaaaggagcaagtcagatatatagccgaatccgttttatcatattgtgagcaaaagaataagactgaatagtggtgataacaatgcaaaaaacagcagtatgcacgagccgccaggcatgggatcgggccgctgacatgtatcaggcggggttgtttcaaagctatgattggggaattctcatggaagagcttcccggcacgtcatttcaccctgtcagactgacaacggacggaggacaggtcatctatcttccgctttttgaacagaagggcgtattatccggcaatatgatcggatacggcggcgttatttcagatcgccccatctcatttgaatggcttcaaagtgaaatcgaggccatattcggccggaacatatcccggatgctgctgccgtacggtcagacttcttttacagaagaaatcggggaagggtggacggaaaaggcgacacggattcttacgcttccggacacgtttgacgaactttggacgggcatttccggaaaagcccggacggcagtcagatacgctgaaaaagagaatattgtcaccaggctgatcgggcgacaagaacttgaatcattttacgacctctacaaggagcatacggcggcaatcggcgctgcttatgtgctgagccaaggatttttccaaaaactgcttgacacgtttggggaccggatgttttgggtcggagcatatcaggatgagacgctgatcagcagcagtatttttctctatgaccgctctcatttctattattggcagaatgtaaacagcctggcgggaaaaaaagcgcaggcctcttacttgttgatgcgtgacgctttgcaattcgccatttgccgcaagcttcaatgggctgattttggctattcacacagtaaagaaatcgcaagaccgaaacgatattggggagctgaagaaaaacaatgccgactttttacgaaaccggaatgaaaacaataagcggccatcaatccagttatctgccgtggtacggtttttttgaaaaaatgtataagtcggatctgtttgccattcatgacacggctcaatttgagaaaaaagggtttctgaaccgcaacagaatcaaaacgccgcagggccccagatggctgacggtgcctttgcagatgaaacaatataaagacatagagcttcggcatatgaaaatcgaccagacacaggattggcggaaaaaacattggatggcgattaagatgaactatgcgaaagctccctattttgagcggtaccagcatttttttcaagatgtctatcagagggagtgggaatatctccatgatttgaatatgcacatcattgaatttttccgaaaagagctccgaatcgaaacgccgctctgttatgtctctgagcttgaatgccggaaggagaaaaaaagcgattttgttttagcgctttgtcaggagctgggggcggatcgttattattcaggcagtcagggttccgactatttaatagaaagcgattttgaaagaaacggaattgtcattgagtatcagcagatccggcattttgactatcctcaattattcggggagcatatccctcacctctccatgcttgatatgctgatgaactgcggagcggatacagctgaaatgttagttaaaggagggcaatatgatgaaagtaatggtatttgcagcgcatcccgacgatgaaattatcggcgtcggcggcacgctcgccaaacatgtccgccaaggtgacagcgtgtcggcagtcattatggcggaaggcaagtcatcaagaaaaacggattatgagaagcctgaagagtctgttatgcagcattctgctcaagaaacggaacaagcgctcagcactttgggcatccatgattttgtcaggctgaaccttcctgataacagaatggattcaatggatttgctggatgtcgtgaaggaagcggagaaacaaatcaatcgttttcagcctgacattgtgtatacccagtacggcggtgacattaatattgaccactccgtcgtattcagagcggtcatgaccgcaacccgtccgcttcccggccatacggtaaaacgggtttttgcctatgaaacattgtcttcgacggaatggaattactgtcagaaggatcagtttcatgccaatttcttcgttaatattgaagacgagcttgaaacaaaattgaaatcgatggcgtgttacggctccgagctcagagacttccctcatccccgctctttgcaggcaatcgaacataatgcccgtgtatggggagcaaaatcgggtttttccgctgcggaagcgtttatgcttgtgagaggaacatggtgactgtcctatgattgctcaaattccgtttttcggacttgatccgaagcaaatcgatgagaaatgggtggaagcgggatacggtctggaagcgaatatttttgacggccgctcctttagtgaagcggattatctcaaaacattcaatcagacgctggaatatgcaaaacagcttgatccttcattattgacgctgcatttcccgacagatcatgccgattatgtgcatgaagatcacatcaaaaaacagctttatcactttgcggagctcgctgtgaaatacggcgccaaaggcataaccgttcatgcgaatcaatttatgacggttgaggaatttcaagtgtatgacctggaaggaaaccgtaaaaaaatcattgagtttttcgcagagtttgatgagcagctgaaagggacggacatttggatcggtgtggaaaaccttccgatcatcgggaatctgggagaggattttgatccgattttcatttatcctgaggattttacagagctggttcagctggatctgaagcatgtcggtattacgtgggatctgtgccattgggcgattacctatcagactcacttgtcttccgcgcttatgttcagaaatgaccagctgagatacccggatttctttcagtttctctcgataaaagagagcattaaacattatcacttcagctcatttcgccagcttgcgttcccgcatggcggcgtccgctgttttgagggccgccatccgagtgaagggacgatcgctgaggagctgctgagacgggctgccgatactttgcaggagctttatcggaatcaagataccggcattgtatttgaggtgatggaagaggattatacggaaagacgggaatcatggagaacgctggaatggttcggcggtgtttctgatgccgaggatcaaaaaagggcctgatatgacatatcgaacaccgaactatgcaaagctttggtgtgcgcaggtgttttcttcagcggcggacggtatctggcttattgcactgccgctgttagtgctggaattgaccggcagtaaaattcttgtcggcgttatttcttttatcgaactcgtgccgttgacatttggcgtgctggcgggaccgctgattgatttattccgaaaaaagtcgatcttgtatttgtgcaatacgggccgggccgtcatcatgatcctcttggcggtgctcagcgcgaacgatttattaaccgtgtggatagcaggggtgtgcgccttttgtctatctctgcaatcgatgctgtttgcgccggcgaaagtcgcgatcattccgctgctcgtccgcaaacagcatcttgatcaggcgacatctctgatcaatacgagtgacttgatcggactcatcgtcggaaaactgatcagcggaatcatgattgcggctattccgttcgggctgctgtttgccataaacggaactgctttttttatctccgcggcatttatcgcgttcattcgtatttcagaacagcccaatgaaaaaagcaacggggctgaagatgtaaaagccggctacagaatgctgaaaggaaatgcggcatggctgacatcggtcggatactttttcgtcgtaaatctcgtcattgccggtcttatttcagtaatggggccgattcttgctgtggaacgttttcagcagaactattctgtatggtttgccgtcatgtattcaatgtttcaggcggggatgcttttgggcaatctggccgtatttttcaaatggaatacaaaacgcttgaaccggctgtatccgcggacgttaacggcagcgggactgctcattttggtgctgttttttccgcttcacgggtttgagtgcatcattttcctggtgcttggcatcatcatctcgtatattgatgtgcaaacggtgctgtatttccaaaagacggttccggccgcatatttcggaagggtttttgcactgattttttccattgtcaaaatgggtgaaccgctgtctgccgctgtctacacagggcttctgctgttgatgaatgcggattatatttttgcggcggtcggactgacccttacgatcgtttttgctgttttttcagtcagacaagggagtcaaagaaattcagagaaacaagcggatcaatccgtctgaatggtaaacgaaggtgcgccggtatcagccggcgccctttttatcataaatccaaataaagccgtatcatatccaggcattgaatgccgttttcaaaaatgtcttcatcataatgtctgataaaaaaatcatggtcgacagcctgaatgcggaatccgcatttttgatagagtgacagctgatgaatactggaatttccggtgccgatttcaatcgtgtcagctcccgattgtctcgctttttcaatggcatcttgcaccagctgttttccgaatcccctgttctgcagcgattcttttaccgcgatgtttacgatttctatcgttttaggccttgtttgcaataaaacgtaaacccctgcaagctcgtctgacgtccaagccgtatagcattctcctcttacaagataatcatcgacaatctctttcgacggatcggccagcagcaatagttcatacagcgcttcatccggatccgcggcttttcggatgctcagtttttgcatgtccgtttctcctcctccgttatgatcgacagctatttttcaaaataactccaaaatcattctactttattataaaatatgaaacataggaaaagttatacaagttttgtagattgaataggaggaaagtcatgtttttttgtaagtattgcggccgacagaacaacgaagaggcgcatttctgtaaagaatgcggaaaaccgatcgggaaaggaagccggcttgaacggcaggcggctgtaagagcggctgaacctgcttcacaaatgagaaagccgatccctaaaaaaacgctcttcatatggggcggcatagccgcagcgctgatcttattgattgccgcatataaaaccggagcctggctgacatctgaaaaaaggctcacggatcaattcgaacaggcggttcatgacggggacacgaaaaagctcgcagccctgctcactccttcagacaaaaaactgaagctgaatgagaccaatgtcaaaccgctccttgcatacgcaaagaaacacgatgaactgctggaaacgcttcgcggcaattcatcagaaaaagatgcggtatacgtcaaaaaagagggtaaaacccttcttttgtttgaccattacgaactgaaagtcgatccggtttatttccgcgtcaccagcaattataaaggcgccgatctttatatcaacagcgagaaaacagggacggtcaaaaaagccgatgaaacccaaatcttcggcccgtatgcacccggtgtctacacggcggaagccaagcttaaaaatgacacggttgacgttgtcaaaaagcaagaggcagaggcggccggcagccggaatgttgattttgatctgccgttagacgccgaggatgtgacgttcactccggcagacagcttcaaaagcgcgaaaggcgatctgctgataaacggcaagtccgtccataaagatccgtttacatccgttacatacggtccgctcttaactgacggttccatgacagccgccgtggaggctgattttccttggggaaaaatgaaaactgccgatgttccgatcaacggtactgatatggaattaacgcttatcccggatcaagatacacaacaaacaatcatggacacgattgtcaaaacaacgaagcagtatacaaaagcgatggcagacggaaataccgatcagatgaccgaggctggttccgcctggaaagagcagacgaaagaagtggtatccggcatgaagagttccggcacctttttgaaagatcagtataaagagacaagctttgatctggattcatttgcgatttctcaagagaacggccgctggcaagtaactgttacgggtaaagagcttcatgagtctgcttatttcgacgggaatacgaagcctgatatggaagaggctgagccgagctttcattatgtactctcatatgatacaaaacataaaaaatgggtttttgaaaaagctgatccagcctcagattcttctgggacaaatgtaaaaaaaataaaaaacgaccagccgaaaacctatacatccgcatgggcatcttccaaaggaaatacagcttcaggcagcgtgacaaacgagcaagtcacatcgtttatgactgattacctgacaaatcaatcaagcgccgtcagccttaacaattttgccatcatggcgggcaatttagaagagggaagccctttgtatgctgatcagcagaaactggtcaaaaaactgtacagcgaggggacgactgaagtatttaataaagtgaatgtcaaaagcttttcacagaaaggctctcatctgacgattcatacgtacgaggagttttatattacgaaagccggcggcagtccgaagctcagaacatacaattggacgtatggcggcgttgtcaaagacggaagaatttatttaacatccattcaataaaaaaacccccgcgccaatcaggcggcgggggtttccgtttttaaaagaagaaataattcatgagttctttcatataatgcttgatcgtgaattgaaacgttacgcaaatgatcaaatagatgacgataacagaataaatgatatccgccttagcagtgagctgatgctgatagctcgccagcatgagcggaggcacggcaaacgccgctcctaaaagaccgacagccagaatggtaaagcaaacggttgtatgaagcagcataaaaatgagggcaagaagcaaaatagctgtaaacggaatcaaaaatgctccgaatctggacagcgaatctttaaatgacacctgcgcgccgccggccttcaaagcgataaaaatcaagagatacaggcagaaaacgcataatgcaaaggtaagcgccggtttgatcacaaccgcggtaaaactgacgtcacgaaagccgtctgataagagaatataaaacataatcggcgtcaccaggcagaaaagcaccatgttgatgatgctgctgacaagctgttcgccgcctgtcgttttacatgtttgatacggtctctttaacacatcaagcacgaataaggcaaattgctttgaagcctgcttagccgcggcgccggcctgagcggcctgaccctgtgtttggcctgcgcctccctgcccgggctggggcgcaccgcatttttcacaaaattttccgccatcagtatgatggccgcattgagaacaatacattctaaaactccttttacaagtaatatagggattttgttcaatatttacattataaaagaaaataggacggatgtaacggagttttctaaagatatataaatcaccttctctatgaattgataatagagaaaaagtacccattatggtagaattttattggagctgatagatatcatgtctctcggcgcattgattcagagtgaaaaaggaaattaacgcatgctaaaaaaattgaaaatgctttatcggctgttgaaattcggaaaaggcttatggagatagcaaacagaaaaaaaccgtccttacaaggacggtttttttctgttttccggatcgtccggctgaggttataaaaagcagaccccggggtaaaaatcatgcataagaaacagcggagaacaaaacataactcaataacggcaagtcataaggaggtacgcatgttttcattcatcattcatgtcttcatttcactgtttgcagtctccaatcccatcggaaacgtgccgatttttctttcactgacggaaggatacccggagaaagaacggacagcgatcgcacgcaaggcttccgtgctgtcgtttatcatcttggctgcttttttaattttcggccatctgatctttaaactgttcgacattaacattcatgccttgcgtatcgcgggcggcatttttattttcggcatcgcttataatcttctgaacgcgaagaaatctcatgtacagtctctccatcatgaagagaaaggggagagcaaggagaaagccgatatatccgtgacgcctttgtcgattccgattatcgccggacccggtacgatcgcgacggtgatgagtctgtcggccggccatggcggcatcatccattacatcagcgtgcttatcggcattgcggccgtcatcgcgatgacgttcatcttctttcactattcttctttcatcagcaataagctcgggaaaaccgaaatgaacgtcattacccgactgatggggctgattttggcggtggtggcgatcggcatgatcggcgccggtctgaaaggcatgttcccgatattggtttcctgacttaaaaaagcagcgcccggttatcttcgggggctgcttttttctattttcggcacatgctgaaacacttcttcactctcaaaaaattctatcaaacggctcagccagtcataataatggagccaatccgtcagttcatccaaaagctgacgggctttttcttcaatatcgggactgagattttccgattccagaagctcagtcagctcgcggttcagctttttatagagcattttgtttttgctgaccgcctttgtccaatttgccgtaaacagggagataaacgtctggtaataatcacgctccacgtcgtaaaggtctttgcgaacgcctttttcaaacactttttccgccagattggcatcagtcatttcacggaccacctggctcatcctcgttttgctcatcccggttgcctctgacagctcatttaacgtcatcggcttgcggttcatataaataataccgagcacacgaccaagtgtggccggcattccgaatgtatgcatattctcggcgattctctcaatgagatgctcttcagcatgcccgatgatatcaagagcgtttttttccacggctgatcatcccttcactggcttttcatgctgacaatatatcatattttttacagttgatgaaaaagatgatgcggcaggatatgcgagctatcgggagcgattgtaagaacatccgcattgtcagcgggataacatgaaaaaatacgtatattgtatataatttcaacacattgtaaactttttattttacaaatttcatcttataataaagattatacttttcagaaaaataacggaacccttcggaggtgcacggattgctgagattagaaaatgtatcgaaagtctataaaggcggaaaaaaagctgtcaacagcattgatttaaatatcgaaaaaggcgagtttatttgttttatcgggccgagcggctgcggaaaaacgacgacgatgaaaatgattaacagactgattgagccgtcatccggaaagatttttatcgatggcgaaaacattatggagcaggacccggtggagctgagacggaaaatcggctacgtcattcagcagatcggacttttccctcatatgaccattcagcagaacatttctctcgtgccgaaactgctgaaatggccggaacaaaagcggaaggaacgggcgcgggagcttttgaagctcgtcgatatgggcccggaatatttagaccgctatcctcacgagctgagcgggggacagcagcagagaatcggcgtgctgcgcgcccttgcggcggaaccgcctcttattcttatggatgaaccgttcggagcgcttgacccgattacacgggattcccttcaggaagaattcaaaaaactgcaaagaacattgaataaaacgattgtgtttgtaacccacgatatggatgaagcgattaagctggctgaccggatcgtcattttaaaagcgggagagatcgttcaggccggcactcctgatgacattctccggaatccggctaatgagtttgtcgaagaatttatcggcaaagaacggttattgcaatcaagaccggacattgagcgcgtcgagcagatgatgaacaaaaagcctgtcaccgttacggcggacaaaacactttcgcaggcgatccaagtgatgcgggagcaccgtgtcgattccctgcttgtcgttgatgacctgaatgtgctgcaagggtatgtcgatgtcgagatcattgatcagaaccggaaaaaagcgagcctcgtcggcgacgtgctccgctctgatctgtatacggtcgagcagggtacactgctgcgtgataccgtacgcaaaattttaaagcgcggaatgaaatatgtacccgtcgttgatgaacaaaggcatttagtcggaattgtcacgcgggcgagccttgtcgacatcgtttacgattcaatctggggcgaggaagaccagctggtgacaggctgacaaggggaggaacgcttacaatgaatgaaatgatcaagtttttgcagacgaacggcggagaactgttatataaaacgtgggagcatttatacatttcgatcatcgccgtcatattaggcattgtcgtcgccgttccgctcggagtggcgctgacgagaatgaaaaagggcgcaggcgccgtcatcggcgccgtcaacattgtgcagaccttgccgagtctcgcgatactggcgttttttatcccgctgttaggcgtgggaaaggtgcccgcgatcgtcgcgctgtttttctattcggtgctgccgattctccgaaacacgtataccggcattcaaggcgtaaacaaaaatctgctggaatcgggaaaaggcatcgggatgacggtctgggagcagatcaggcttgtggaactgccgcttgcggttccggtgattatggcgggcatccgcacatccaccatttatctgatcggctgggcgacgcttgcttcctttatcgggggcggcgggctcggagactatatttttatcggcctgaatctctatcagcctgaatatattatcggcggcgccgtgcccgtcaccattttagccattatcattgattatctgctggcggcgacggaacggaaggtgacgccgaaagggctgaaaggactgaaggaagtatcataaggagttggctgttttgaaaagaaaccaaaagagatggatgtgcgcactggcgctgtcagctgctctgcttctgggcggctgttcccttcccggcctgagcggggcttccgatgatacgattaaaatcggggcgcaaagcatgacggaatcagaaattatcgccaatatgctcgcacagatgattgagcacaatacagacttgaatacggcattaattaaaaacctcggatcgaactatgtccagcagcaggcgatgctcggcggtgaaatcgatatcgccgcgacgcgctactcgggaacggatttaacgagcaccctcggcatggaagcggaaaaagacccgaaaaaagcattatctatcgtccagaaggaatttgagaaacgcttccattacaaatggtttgattcttacggatttgagaacacatacgcttttaccgtcacgaaagagcttgcggaaaaagatcatttagacaaagtatccgatattaagaagcatgcggatcaatttaagctcggtgtagacaatgcgtggctgaaaagaaaaggcgacggctataagggcttcaccgacacgtacggttttgaattcggcacaacctatccgatgcagatcggacttgtatacgatgccgtgaaaaacgggaaaatggacgccgtcctcgcttattcaacggacggacggattaaagcgtacgatctgaaaattttaaaagacgacaagcagtttttcccgccgtatgactgttcgccggtcattcccgacagcgtgctgaagcagcatcctgaactgaagggcattgtgaataaactgatcggcaaaatcgatacggaaacgatgcaggaattgaattacgaggtggacggcaagctgaaagaaccgtccgtcgtcgctaaagaatttttggagaaacatcattattttgaataagaaatgaggtggggcaaatggaagtgctgcagcagctcggcacttattattctcaaaacggggcctatgtgcttcaggagttttaccgccattttctcatgtcggtatacggcgttttatttgcggcgatcgtaggtgtcccgctcggcatcttcattgccaggtacagaacattaagcggctgggtattcgcggtgacaaacgtgattcagaccgtgccggcgcttgcgatgcttgcggtgctgatgctcgtcatggggctcggcgccaatacggtgattttgtcgctgtttttatattcgcttcttccgatcatccggaatacgtacacaggaatcgccagcattgaacacgcttatcttgaatcgggaaaagcgatgggcatgaccaaatttcaggtgctccgcatggtggaactgccgcttgcgctttccgtcatcatggcggggctgcggacggcccttgtcatcgcgatcggcattacggcaatcggaacgtttgtcggcgcgggcggactcggtgacatcattgtcaggggctcaaacgccacgaacggaacagcgattattttagccggcgccattccgacagcgctgatggccgttatcgcagatcttgtgatggcatggctggagcgggcgctgagtccggtgagaaagaaaaaacgaaccaaagcgccgaatgcggcatgaaaaaaacgccttgcgggtcagggcgttttttttcttatggcttcggaacatgcttgaatatttcttcgctttcaaaaaactcgatcagacggctgatccagttgtagtaatcaagccaatcctttaattctttcagcagttcgttgattttttcctcagcttcttccggcacgccgttttcaaggacggccgtcagttcgcggttcagttttttatgcatcattttatttttgctgacgaccttgctccatgtggccgtaaacagcgtaataaaggtttggtagtaatcctgctcgacgtcgtataaatctttgcggacgcctttttcaaacactttttccgccagattgacgtcaagcatttcacggaccgcctggctcattctcgttttgctcatgccggtcgcttctgataattcagttaaggtcatcggcttgcggttcatataaataatgcctaaaatgcgccccaccgtcgcgggcattccgaatgtatgcatattttcagcgattcgttctatcaaatgatcttcagcttgttcgattacgtgtaacggatctttctccaacagtttcaatcctttcagtcagcaattccgatgtcaatataccacatttttaaaccggcggaaatgctcttccgagagaatttggcagtaattcggagcaataagaagaactttgccggtcaatacgggtaaatcagtgcttacacaacctttatatataatatggacaaattgtaaactttttaatttacaaagtttaatttataatgggaaacgttcaattgtctgaaaagttaaatttgaatttaacgatttgaacaaatttaatatcggaggtgtgagtgtttgctgacattagaaaatgtctcgaaaacgtataaaggcgggaaaaaagccgtcaacagcatcaacctgaatatcgacaaaggcgaatttatttgttttatcggaccgagcggctgcggcaaaacgacgacgatgaaaatgatcaaccgcttaattgaaccgacagaaggcagaatcctgatagagggccgaaacattatggaacaagacccggtggaactcagaagaagcatcggctatgtcatccagcagatcgggctgtttccgcatatgaccattcagcagaacattacgctcgttccgaagcttttaaagcattctgccgaaaaacggaaggaacgggcgcgggagcttttaaagctcgttgatatggggcctgaatatttagaccgttaccctcatgaactgagcggaggacagcagcagcgaataggtgtattacgggcacttgccgcagagccgccgcttatcttaatggatgaaccgttcggggcgcttgacccgattacgagagattcccttcaggaagaatttaaaaaactgcaaaaaaccttacataaaaccatcgtatttgttacccatgatatggacgaagccatcaagcttgcagacagaatcgtcattctgaaagcgggagaaatcgtccaggccggaacgcctgatgagattctcagatttccggcgaatgaatttgttgaggagtttatcggcaaggaacggctgattcaatcatccagccctgatattgaacgggtggagcagatcatgaatcccgatcccgtgacggtaacacctgagaaaacactgtcagccgccattcagctgatgcgtgccgagcgggtggattcgctgctcgtcattgatgaaaagaacgttctccaaggttatgtcgatgtggagatgattgaccgcaaacgaagacaagcggtaaccgtcgcggaagtgcttgaacgggatctgtacacggtcagaagcggcactctgcttcgcgacgccgtccataaaattttaaaaagaggcgtgaaatttgtgccggtccttgatgaggacggccggctaacgggaatcgtgacaagggcaagcctcgttgacatcgtctatgactccatctggggagaagagaatcagctcgcggtgatgtcatgaggaggcttcaattgatatgaatcagaccgtacaatttttacaggcaaatggaggagagatgctttataaaacatgggagcatctgtacatctcattaatcgccgtcatggcgggcattctcgccgccgttccgctcggcgtcctgctgacgaggatgaaaagaggagccggcgccgtcatcggcatcgtcaacatcattcaaaccttgccgagccttgccattcttgcgttttttattccgcttttaggcgtaggaaaggtcccggccgttgcggcgctgtttttctattccatgctgccgattctcagaaacacgtatacggggattctcggcgtcaatcggcaccttctggaatcgggaaaaggaatcggcatgacggcatgggagcagatcaggcttgtagagctcccgcttgccgccccggtcatcatggcgggcatcaggacgtcttcgatttatttaatcggctgggcgacgctcgcctcctttatcggcggaggcgggctgggagattacatttttatcggcttgaacctttatcagccggagtatattatcgcaggcgccgttccggtcacgatgctggcggccgccgtcgattacatgctgggggtgacagaacggaaagtcacgcctgacgggctgaaaagcataaaggacgctttataaggaggaggtctcacatggggaatagatgcaaaaaacggctgctcgcaatcgcctgtctcggcatgctgctccttggcggatgctcgctcccgggattgagcgccgcatcggaggacaccattaaaatcggcgcgcaaagcatgaccgaatcggaaatcatcgcaagcatgctcggacagatgatcgaacatcacagcgggttgaaaacatccgttattaaaaatctcggctccaacgccgtacagcagcaatccttgatcaacggtgatattgatatcgccgcgacgcgctatacaggagacgcgctgaccgggacgcttcgcatggagccggaaaaagacccggacaaagcgctgcggctcgttcagcgtgaatttcaaaacagatatgacatgaaatggtttgattcttacggctttgataatacatacgtctttaccgtttccggacagcttgccagcaagtaccatttagaaacggtatccgatgtcaaaaaagaagcatcccatctgaaattcggcgtagataactattggatgaagctgagaggcaacggatatcaggattttatgaaaacatacggaatgtcatttgaaggcacgtatccaatgcagatcggcctcgtatacgacgcgctgaaaagcagaaagatggatatcgcgctcgcttattccaccgacggaagaatcatcgcttacggactgaaaacgctgaaggatgataagcggttctttcctccgtatgactgttcacccgtcgttccggatcatgtattaaaagagcatcccgaactggagggcgtgatcaataaaatgatcggcgcgattgatacaaagatgatgcagaaaatgaattacgaagttgacggccgattaaaagagccgtccgtcgtggccaaggaatatttagaaaaacatcattactttgaataacggaaaggagatgtgcggatggacacgatgaaagagttgtttacgtattacgctcaaaacggcagctatgttctgtatgagtgctggcggcactttctcatgtcggcgtacggcgtcgttttcgccgccgttttcgccattccggccggaattgtgacagccaggcacgggcgtctcgccggctgggtgtttgctgtggcgaacgtgattcaaaccgttccggcgcttgcgatgctcgccgtcctgatgcttgtcatggggctcggcgccaatacggtcatcacggctttgtttttgtattcactgctgccgattctcagaaatacgcacacgggcattatcaatatcgagcacgcttatctcgagtcgggaaaagcgatgggcatgacgaaataccaaatccttcgtatggtggagctgccgcttgcgctttccgtcattatggcgggtctccgaacggcgctcgtcattgccatcggcatcacagcgatcggcactttcgtcggcgcaggcggtctcggggatatgatcgtcagaggctcgaacgcgacaaacggaaccgccattattctggcgggcgccattccgaccgcgctgatggcggtggccgcagacctgctgatggcgtggctggaacgagccctcagccctgtgaaaaaacaaaaaagaaagctgatcgtacgctcagcctcatgaaaaaaagcattcttccgcgtgaaggatgctttttttgatttcttgattaaattttgataactgcgctgtaaagtcttacatatcaaataacaaagcagaggggtaatcatatgagcaacatcatagaaacgagacagctgcaaaaatcattcggcagacaacaggcagtggctgatgtgtctctatcggttaagcgcaacagtatatacggcctgctcggtccgaacggcgcgggaaaatcgacgactctcaaaatattgaccggcatgctgcagcaaacatccggcgaggttctgttcgagggacatacatggaagcgcgaagatttgaaaagcatcggttccctgattgaagcaccgccgctttacagcaacctgacagccgctgaaaatctgaaagtccgctgcgtgatgctcggactgcctgattcaagaattgcggaggtgctggaaattacgggattaacgggaaccggaaaaaagcgcgccggacaattttccatgggaatgaaacagcgtctcggcatcgcgttggcattattaaaccgtccgtcgctcttaattcttgacgagccgacaaacggattggacccgatggggattcaggatttgcgggaatttatccgctccctgcccggacagggaatgacggtgattttatcaagccacctgttatcagaagtggagcagatcgcagaccatatcggaatcatcagtgacggcgttttaggatatcagggagaaatcagccgggaagacgatctggagcggctgtttctggaggttgtcaaatcaacacgggagaaagcggggacaggaaaatgattcagtacatgcaggcggaacaccttacatctaaaagaacatttatcagaaagctgatcattctgattccgcttctgaacgcggctttttcttttctgctgaatgcggcctattttatgacgggcacgttcaattggtgggcggttattttcatgccgctcatgattgctctaatgtgcggtttatctgttaaaaaagagaaaaaatcagcgaatgaccgcgcggtgtactcattgccggcagatttaaaaagcatatggttctcaaaaataagtttgatcgcgctgtattcactcctgtcgcaaatcgtctttttagtcatcgtgtttttgcttggccttgtgtttccggcaattgctgcgctgcagctgaaaggcgttgaagcaagctcccttttgtggctgacgacgctttgggaaatcccattgtgcttatggattgccagacagttcggatttacggcagtcattctcatcaatatgatcgccgcctttgttttaggcattgtgccggcgtccggttcattgtggtggctgagtccgtggagctggtcagtccggctgatgtcaccgattctcggaatccacccgaacggaattccgcttcccgcaaacagcggcttattaaacggaaacgtgatcattccggctattattctttctattctttcttttatcgcaataagttttgtttccgcagtgtcattttcaaaaggaggaaaccggtcatgaccgtgcttttacgatatatgtgggccgatgtattaaaaatgaagcgcacgccgctcatatggatgcatgctgcggcgccggttttatgcgcgggatttttcctgttatatatgtatggaagggttcaggagtcttatatgctgtacagcgtctttttcagcgcgattgccgttttataccctctgatcatcagtattgtctgcggcatgtctgcctctgtcgaggaacaggcgggccattttcagatgatgctggcggttccgtattctaaaatcgtcagttttgcgggcaagctgcttctgctgctcctattgaatgtgttatcggttggtctcgccatctgtctttatttggcggggttgaaatttgttcttcacatcaatgatctcccgtatcttctctttttaaaaggaggggcgtggctgattgccggcagtattccgctttatatgatgtctttttttgtcggcataaagtacggcatgggaccgtccgggcttttagggggtgcgggattattaatggcggcgctcatgaatacgggacttggcgatatcatctggcgtttttttccgtgggcatggagcgtgaggctttcaggccttgcaggactgctgcattttgacaaagtcaaaaaagagttcctcccttatgtaagatacgatatgagattcggagaaataatgttatatttttctatagtgatattatgtctggccggcctctattggtgcagaagatgggaagggcggcgttcatatgaataaaggcaaggagcgattcggccggtggcaaacattttagcaattgatgatgaaaaagatattctcgttctgatcagaaacattttacagcgtgatcagcatacagtaacgattctggaaaaagcggaagatcagtcattggatttttttcaaggctatgatttgattcttcttgatgtcatgatgcccggaacggacgggattgaactctgccggcggattcggccgctggtggacagcccgatcctgtttttaacggcaaagtctgacgaagaatccattgtgaaaggcctcatgacaggcgctgatgattacatcacaaagccgttcggcgtacaggaattgatggcaagggtaaacgcgcatgtcagaagggaacggcgggaaaagcatcagacgaaacggctgatatcaggcttcatgtttgattttgacaataaagaagtatggatggatgaccggaaactgcctcttacgaaaaacgaatataaaatcgttgaatttctggcacagcataaaaacagaacattctcacgggagcagatttacgaggaagtgtacggcttggacggcgatgcgctctattcaaccattacggagtttatcagaaccatccggaaaaaatgtaaagaacacggggctgatccgatcaaaacggtgtggggtgtcggatacaaatgggaatagcaaaaggaaaatccagcatccgcaaagagcttgtcaaatttaccatcactttgtgtctgagcacgatgggggtggcggcattatgcgtcgccttaaatgccattgccatgaatgccggagcgatcctgcccgcaaactacagcgagcatgaggcggaacagatcaaaccccgcctgaaatcagcggaaaagataacagaagacatgatccccgcaggtatgacatacgccgtttttgataaaaaaacaaagcggatgacaaaaggaacgatgacggaacaagatgcggccaacgccagaaaaaagattcagcatacgccgtattttaattatgctcaaaaaggattcatggtgataaatcggaaagatgaatacggcgttctccaatattcactcaggtcggaatttcagtcgccgctgttaaggcgctatctgccgaattatgaatggacgggtcttacgattctgatcactttgcttcttttgactgtttttatcgtgacgacgcgtttcgccaatcagctgagacggcatttcagcacactcagctccattacggcaagcattcaaaaacagaatttaaatatcaatccaaaaaggtcgcgtataaaagaatttgacgatgtcattgactctctgctgaaaatgaaagacgcgcttcaggcatctctggcggcgcagtgggaggcggagcggataaagaaagaacagatcggcgcgcttgcgcatgatattaaaattccggcaacgatcattaaaggaaatgccgagctgctccagttaacagaacctgatgaggagcaggcggaatatgcgcagtatatcctggatgccggaaacaaaatcgagcattatgtcggacagctgatccagctttccaaagcagaggaggcagttgccgttcatgtcgaatataccgacctcaaagagtggattcaaaacatatatcgtgacgcggcggcgcttgcggggccgaagcagatggatctcgtcctcagcgaacggggaattgaccgaatagaagcgccgatcgatcatgagctgctccacagggcggtcatgaatatcgcggcaaatgccgtcgactatacgccggaaggaggggaaatccgtgtggacgtcctgtgcaccgattccgccctccatcttgccgtatccgacagcggaagcgggttctcgccggaggcgctgaaaagagcgacacagcttttttacacggaggataaaagcagacattcggcggggcatcacggcatggggcttacattcgcccatcacgtcgtacatcttcatcacggcgaattaatacttgaaaatcaggagtctggaggagcccgggcggagattcgaattccgctggaaggcgtcagacaaaaacaagccctgcacgcctgagggcttgtttttctgtataagaaaagcaaaaataaaaacggctgtccgtttgagagatcagccgcttatgcggaaaagagtttatcaggaaggatcaatccatgttgaagaccacttggaaatttcctctaaaataggggctaatgcgcagcctttttccgttaaagaatactcaatgcggacaggcgtttcggggataacatcccgtttgatgacaccttctgtttcaagttctttcagacgttctgacaagactcttccgcttaaattcggaagcgccgcttcaatttcgctaaatcgctgctgtccgttcaataactgaaagacgattagagccacccagcgtttacttaggatgtcgaccgctttttcgaatctggggcacatttctgattggttcatgctttttcacctcgtcttctgctattataccgcaaaatcggagggaacgtacgtctggcgcttgttaagttgaggagaggatcaaaaagaggatgaggaatccggggagcgttttttcgcttcagccgcaataaaatcaaagtatttgctgacgctttcaatatcttcttttgtgaagtgctgccactttttgctgtcaaacagcggcagatgctccgcgcctctgtcaacggcggtctgatagatggcgcagatggattgatagctttcggaggtttcacggatttcctcctgaaatgccttgatgtgtccggcccgcgccattaactcctcgtacgggatttttaatgtgtccgccaattttctgatggtcgcgggtttaggaatgccgcggtgcccgttttcaattctggaaatggtcgccgagctgacgccggaatagacggcaagctgattgacggtaagcttccgggcgcggcgcagctctcttaattgctttccgaatgtgttcaataagatcgcctcacatgtgcaaagtcatgagtcttcatttgttctttttttggcttccgccgataagaacgcaaagtatttatcaagcagaaccaagtcttctttcgacaggtgccgccagttctcccgctccaaaagggataaatcatgcagctcatacgtttcggctttttccagcaaggtgcagcccgtgtcgtacggggctctcgtttcctggacggtctctatgtatcccgccgtctgcatcagttcctcatacgggatttttaacgcatctgcgagctttttaatggttgcaggtttcggcactccgcgtttgccgttttcaatccgcgagattcccgcggcgctgacgcctgaatacgttgccagctgattcactgtcagatgccttttttcccgtaatgtccgcaattgtttcccgaagctttccacagtctctccccctcccgcggtctatttatattctagtatgtttattgactaaagggaatagccaggctggaaaagtattgacaaaagttaacaaaagccgtatcttatgtataagaaagaaagtatttgacagaacggaaggtgaagaaagtggtcgaaaagatacagatcagaagagattatgtgctgcagtatatggtcaataatgactactcgttaaaccagctcgccctggagatcggaatatctcccgccacactgagccgtgtactgaatggagagcgaaggccgggccagctggtcatcggaaaaatgctctattactttgacatgaaatttgaagatcttttttactacgactttgttgacaaaagtcaatgaagatggaagattcaaacgcatttccgtttttctgacatgatgtacaccgatacggcgtgacatgcctttgtttttcatgtaaaatagaagcaatgtaggccagtcagtctggaggtgtatgggatgcacacattattgattaccttattggttatcgtcagtattgcacttattattgtcgtattgcttcaaaccagcaaaagcgccggtttatcgggtgcaatttcaggcggggcggagcagcttttcggaaaacagaaagcaaggggccttgatctgattcttcaccgcacaaccgttgtgctggcagtcttgtttttcgtgttgacgatttcgctagcgtatatcgtataaggcaatgtttgtataaggtctgatttaatatcaggcctttttcttgttgagagacggcgtttgtttctcgcaaaactgtggaaaactaaattgaatgtgcaaaaaaggggttatgagcatgaaaattgtgacaccaaaaccatttacatttaaaggcggagacaaagcggtgcttctgctgcacggatttacgggaaatacggcagacgtcagaatgctcggccgctacttgaatgagcgcggctacacttgtcacgcgcctcaatataaagggcacggcgttccgccggaagagctggtacatacgggacctgaagattggtggaaagacgtcatggacggttatgagtatttacggtctgaaggctatgaaaacattgcggcgtgcggactgtcgcttggcggggttttttcattgaaattgggttacactgtacccataaagggaattgttcctatgtgtgcgccgatgcacattaaaagtgaagaggttatgtacgaaggagttctctcctacgcgcgcaattataaaaaattcgaaggaaaacagccggagcagattgaaaaggaaatgaaggagtttgaaaaaacgccgatgaatacgctcaaatcgctccaggagctgattgccgatgtgcgcaaaaacgtcgacatgatctattccccgacatttgtggttcaggcacggcatgaccatatgattaatacagaaagtgcgaacatcattttcaacgaggtggaaacggacgacaaacagctgaaatggtatgaagaatcaggccatgtcattacactcgataaagaacgggacctcgttcatcaggatgtgtacgaatttttagagaaactcgattggtaacaaacaggaggtcgaataatggaaaaagaagcgtttatggaccgtcttctcgcgtttatgaaggaagaggcgtacaagccccttaccattcaggaactcgaggagatgctgaacatcacggaagccgatgaatttaaagagctggtaaaagcgctggtggcgctcgaggagacgggacagatcgtccgcaccagaagcaaccgctacgggcttccggaaaaaatgaatttagtaaaaggaaaaatttccgcgcatgcgaagggcttcgcgtttctgctgccggaggatacctctttaagcgacgtgtttattccgccgaacgagctgaatacggccatgaacggcgatattgtcatggtgcggctcaattcccagtcaagcggatcgagacaggaaggcacggtcatccgcatcctggaaagaagcatcgaccgcgtcgtgggcacatacacagaaacgaaaagcttcggctttgtcatcccggatgataagaaaatcacgagtgatatttttattccgaaacatgccaataacggcgctgcggaaggccataaagtcgtcgtcaaactgacaagctatcctgaaggcagaatgaacgccgaaggggaaatcgttgaaatactcggccataaaaatgatccgggcatcgatattttatccatcatccataagcacggcctgccgggagattttccggctgaagcgatggagcaggcaacaagcacgcccgataccatcgatgaaaaagacatcaaagaccgccgtgatctccgcgatcaggtcattgtcaccattgacggcgccgatgcgaaggatctggatgacgccgtcaccgtgacaaagcttgataacggcagctacaagctcggcgttcatattgccgacgtcagccattacgttacggagaattccccgattgacaaagaagcgctggaaagagggacaagcgtgtacttggttgaccgggtcattccgatgatcccgcacagactgtctaacggaatctgttctttaaatccgaaggtcgaccggctgacgctttcctgcgaaatgacaatcaaccagcagggacaggtgacggagcacgagatcttccaaagcgtcatcaaaacgacggaaagaatgacctattcagatgtcaaccggatccttacagaagacgacgccgagctgaaagaaagatatgagccgctcgtcccgatgtttaaagacatggaacgtctggcggaaattctccgggcgaaacggatggaccgcggcgccgtggattttgatttcaaagaggcgaaggtgctcgtcgatgaggaaggcgccgtaaaagacgtcgtcatcagagagcgctcagtagcggaaaagctgatcgaagaattcatgcttgtcgcaaacgaaacggtggccgagcacttccattggatgaacgtgccgtttatttaccggattcacgaagagccgaacgccgaaaaactgcaaaagttcttggagttcgtcacgacattcggttatatcgtcaaggggaaagccggagacattcatccgcgcgcgctgcaaagcattcttgatgaagtgcgggaccgtccggaagaaacggtgatttcaacggtcatgctccgttccatgaagcaggcgaaatacgacccgcaaagcctgggccatttcgggctggcgactgaattttatacgcacttcacatcgccgatccgccgatatcctgacttaatcgttcacaggctgatcagaacgtatttgatcaacggacaatcggacgaagcaactcaggaaaagtgggccgaacgccttccggaaatcgctgaccatacgtcaacgatggaacggcgcgccgttgatgccgagcgggaaacggacgatctgaaaaaagcggaatatatgcttgataaaatcggcgaggaatttgacggcatgatcagttccgtcacgaatttcggaatgttcgtcgagctgccgaatacgattgaagggcttgtgcacgtcagctttatgacggatgattattaccgttttgacgagcagcatttcgccatgatcggtgaacgcacgggcaacgtttaccgcatcggagacgaaatcacggtcaaagtcgtcgacgtcaataaagatgagagaaacatcgactttgaaattgtcggcatgaaaggcacccgccgtccgagagaaacaacaggcgaccgcagaaaacgaggcagaccggcgcggaaacgcgtgttaaacagcaataccccggcttcaccgccgaaatcggaggaaaaaggggaatggtttacaaaaccgaagaagaaaaagaaaaaacgcggcttccaaaacgcgccgaaacaaaaacgcaaaaagaagaagtaaatgcgaaaagcaaatagggcataatgctctgtttgctttctttcgcaagccgcattttcattgtcgcggaacgctccatttgctaaaataaagcgtatcgcacacatgaacggtttttgcggagagaggaggataaggcatgccaaaaggatcaggcaaagtattatcgcaaaacaaaaaagcaaaccatgattactttatagaagaaacctatgaaacaggcatcgtgctgcagggaacggagattaagtccatccgcgccggccgcgtaaacatgaaggattcctttgcgaaaatcgagcgcggcgaagtgttcctccacaacatgcacatcagcccgtacgagcagggaaaccgctataaccacgacccgctccggacgagaaagcttttgatgcaccggaaagaaatcaataagctgatcggcctgacgaaagagaaaggctattccctcgtgccgctgaagctgtacttgaaaaacggcttcgccaaagtattaatcggcctcggaaaagggaagaaaacatacgataaacgtgaagatttaaaacgaaaagacgccaaaagagaaatcgaaagagcgttcagagacagacaaaaaggcttctgatgcctgagccttgatgtgatgatatgccctgtgctatactgttcacacatcagattcacaggctgtttattgaagatattcccaattgaatttgcctgtgatcatggtataataacagtacagccagttgagcaagagcttgatagatctcccgtatacccttaacaaggggacgttacggattcgacagggatggatcgagcttgagctgcgagccgagaggcgatctcgttaacacgcacctaaatataactggcaaaactaaaagttttaaccaaaacttagcactagctgcctaataaacgcagcgagctcttcctgacattgcctatgtgtccgtgaagagcacatccaagtaggctacgcttgcgttcccgtctgagaacgtaagaagagactgacagactagctctcggaaggcccgcccgcaggcatgaagacgagtgaaacacgaaatatgcaggctacgctcgtagacgcttaagtaatcgatgtttctggacgtgggttcgactcccaccgtctccatacataacagaggaaccgcagtgccgtcacatgacgcactgcggtttttttatgccgacaaaaaggagtgaatgtaaatggaaatcgtcatcatagacggaaaagatgttacaagcacagaagctttacaccgaatcttaaaagatcaattagatttcccggacttttatggtgaaaatctgaacgccttatgggattgtctgacaggctggatcgaacttccgctgactttggtgtggaagaattttgagatcagtcagaaggaattgggttcggatgctgatgatgtcttggagctgtttcaagaggctcaggcagaattagatggtgaatttttcattcaaattgatcagccgtcagccgggacaacggacaggcactaaaaagtgcgtacttcccctcatccatttttctatccgataatagggacggaaggtttcaggctttcgatttctgtccatatataagaagagacttgcgatagggaggaatggatgatggacttgcagttgaaagggaagacggcgcttgtgacgggatctacgtcaggcatcgggaaggcgattgcggcttcgctgattgcagaaggtgcggccgtgatcattaacggccgccgtgaagaaaaggtgaacgaaacgatccgggaactagagaaacagacgccggatgcccgtctctatccggccgcgtttgatttaggcacggcggaaggatgcggcgcgatttttcagcagtatcctgatgtggatattctcgtcaacaatttaggaatctttgaacctgcggaatactttgatattcctgacgaagagtggctccggtttttcgaggtgaatatcatgagcggcgtgcggctgacacgccggtatgcaaagcggatgattgagcggaaggaaggacgggtgatctttatcgcgagtgaagcggccgtcatgccttctcaggaaatggctcattacagcgctacgaaaacaacgcagctgtcgctgtcacgcagcctggccgagctcacggaagggacgaatgtgacggtgaatacggtcatgcccggctccacgaaaacagagggcgtcgaaacaatgcttgagtcgctttatcccggtgaaaacttgacagcggctgaagcggagagacgatttatgaaggaaaatcgtccgacgtccatcattcagcggttgatccgtccggaagagatcgcccactttgtcgcctttttaagcagcccgctgtcgtctgccattaacggatctgcattgcggatcgacggcggcttggtgcggagcattatataagatgaacataaaaaacccccgcaaagtggcgggggtttttttaatgcggatcacgctgaaaccggctgatgatcctgctgattaaatcttttgttgcacagtcaaagtgctcttctttttggtttgtcaaaagcccgacaggcggtgaaattgttaagttatggatcggaatgaccttcgtgccctcgatcggctctgaatgcgccgtcgccgtaaagattgagacgccgatattttccctgacatagtattgatgagccatgctgctggtcagctccatttttcgatagcggctcccgatggcccgctgcaggtgctgttcaatttgaatccggatcgggcaattggcgggcgtaaaaatcaggcattcattttctaaatcttcgagattaacgcttgctttggcggcaaggggatgtctgtctgacacgatgacattgagcgagtcatggaaaaacggatcgaaataattttccagaatcagctccggctcgccgcataccgcaaaatcaatagcgccctccagcagtttgcggctgcatgtattggcatcatccacgctgacattgaccgacatgtccggataatcatttaagaaaccccgcagcacggcagggaagatcaggcttgccgtcggttcggatatgccgatctgaataaggccggcctggccctgtctgatatcggccagagtatggtcaagcacctcgtattgcgcgagaagctgcccggcccgctcatgaaacagccgccccgcccttgtcagcttcagcttctttccacgttcaaacagctgcgcgcctacatcctgttccagctgtttaatccgcattgaaatcgtcggctgtgagtagttcagaatttctgcagccttataaaagctgcctgactgtacgatggtatgaaacgttttaatggttcgtagttccaacgaaatcccctcccggctgttcattaattttcttgaacctttcctttactttttttgattagtcaaacaaatcagtttgctttatagtataaacaatcaaagcttagtaaacaaattggaattatatattttttgcggggagagtgaccggaatgagtgaagacatatttcgattggctgagaaaaaggatgcgccggagtttttagagctgctgtacagcgcgtttcagccgatccgcaatttggagattgactggccgtcggcgcgggccgacatcgatatggtaacggaaaatattgaaaatcattcagccgtcgtgctcgaacgggatggacggcttctttcaaccattacgatccgttttccgtgggagagtgacacgcctccgtcaaaatatccgtttgtctggtggtttgcgacgcttcctgagctgaaggggcagggcatcggcagcaaacttttgacttatgtggaggaacatgtgctgcgggatacgctgaaggccccggccatcacgctcggcacttcggcgcgcaagcatccctggcttgtagatatgtacagacggaggggatatgaagtgtattttgagcaggagaaagacggagacatcggagttatgatgagaaaggtgctcataccggagcggtttgacgcgtcgctgttaggcacaccgagctgggcgcaatgatcaaaaaacggatcagagccggctgtctgcttctgctgctcggcgtgctggccgggtgcgggcaaggagaaagcgcaaaagcggggagcggcgtgcagaccgtcatcgtcggcacgggaactgattttccgaacattgcttttatggatgaaaaaggcgagctgaccggctatgacattgaagtgatgaaagccattgatgaacagctgccgcaatacaaatttgtctttaagacgatggatttttcgaatctgcttacaagtctcggaaaccggaaaattgacgtgatcgcgcacaatatggcgaaaaacaaggaacgggagaaacgctttttgtatcacaaaatcccgtataactactcgccgatgtacatcacggtgaaggcggataatgacgcggtacgcacgctccgggatttaaaagggaaaaccgtcatcgtcggcgcgacgtcaaacgcggcggattatatgacggcatacaacaaaacccacggcagcccgatacatttgaaatacgccgggcagggcggcaatgatacagcgaaccaaattgagacaggacgcgctgacgccaccgtatccacgccgtttgccgtcgattttcaaaataagacgcacgcgttcaaacaaaagacggtcggtgatgtgctgctcgataccgaggtgtattttatgttcaataaaaacagccaaaccctggcggacgatacggatcgggcgattcaaaggcttgtgagggacggcacattgaaaaggctgagtgaaaaatggctcggcgcggattattcaaaatcaagtttcacgaaataattgaagcagaaaacggggcgatcacatgaaaataagattggcggtcatgtcattaacaattgcggcaacggcggcgttatcagcctgcggcgcgggaggggaggcggcatcaggcaatcagaaaaacgtgaagaacattacggtcggcacggggactcaattttcgaatatttgctttattgatgataaaggcaaattgacgggctacgacgttgagctggtgaaagagcttgacaggcgcctgccggactatcgatttacctttaaaacgatggatttctccaacctgcttgtcagcctcggccagcataaagtcgatatcgtggctcatcaaatggagaaaagcgccgaacgggagaaaaaatttctgttcaatcaagtcgcgtataacaacttcccgctgaaaatcacggtgctccaagataatggggacattcacggcattaataacttgaaaggaaagcgggtcattacaagtccgacgtcaaacggcgcgcttgtcctgaaaaaatggaatgaaaaacacggcagtccttttgaaatcgcctatgccggccaaggttcaaacgatgcggccaatcagctgaaatccggccgcgccgatgcaacgatttcaacgccgtttgctgtcgattttcaaaacaaaacgagcgcgatcaaagaaaaaacggtcggcggggtgctgtcaaatgccaaagtgttctttatgtttaacaaaaatgaacaaacgctgagcgatgacattgataaagcgctcaaggaaatcattgatgacggcacgcttaaaaagctgagtgaaaagtggctcggcgcggattattcaagggagcaatattaagtgaaaaagagagggaccggcaatggaaaaagcgtttgatatcagtatgatcgcgtcctttgtgccgacattgctcgggtatttgcccgtcacgctgtatatattggcggtgtctttgctgttcggctttctattggggctgcttttggcgctgccccgcatctatcgcattcccgttttgaatcagtttgcgaagctgtatatctcttttttcagaggaacgcctatcatggtgcagctgttcattgtattttacggcattccggcgctcacggcgctcgccggaattgatacctctaaaatggaccctttgtatgcggccatcgccacgtatgcgctgagcagcgcggcaagagcggccgaaatcatcaggggaggtgtgaacagcgtcggccgcgggcaggcggaggcggcgttcagcatcgggctgaacagagggcagacattccggcgcatcattctgccgcaggcgctcgtgcaggcctttcccaacatcgggaatatggtgatcggtttcttaaaagatacatcactcgctttttcgatcggggtgatggatatgtcgggcagaggacagaccttgattacatcgagcaatcattctcttgaagtgtatatctcgctgtctgttctgtattacgcggccgcccttttatttgaatgtgtcttcagatgggccgaaaaacgaatcaagaaagatgagacgcgccttgtgacggtttttgacatgagtgcgcacggctgaaaaggagggagaacagtggagctggacattccgtttatcggcactgcgataaaacaaatgttgaaaaccgttccgcttacattggcgatgacgatcattccgattattgccggatttttcatagctctcggcaatatcacggtgcgtatattccgcatcaaatggctgctggcctgctcagcgttttacgtgtcttttttccgcagcaccccggcgattctccatattatgctgatttatttaggggttccgctgattgccgatcaattcagccgcgcgtttcatctcggctggtcagccaatcagattccggtcgccgtgtttgtcatcatggcactgtcattaacggcaggcgcttatatgacggaaattctccgatccgggatcatggccgtcgatacggggcaggcggaggcggcatattcaatcggtctgacgcggggccagttgattcggcgcgtaattctgccgcaggcgttcatgatatcgctgccgaacttcaccaatataggcatcggctttttgcataccacttccatcgcggcaattgttgcagtgcctgaaattacaggaacggcgacgattgcggcatccgataactatgcgtttctggaagcatttatcggggcggccgtgatttattggggattaacgctgattctcgaagctgtaaacagtctggcggaaaaaagagcggccagatatcaaggaggcgcattatgatcgaaatccgaaacattcagaaatattttggcagtcatcacgtgctaaaggggatcaatttaagtgtccggaaaggagaagtcgtgaccatcatcggcccgagcggttccgggaaaaccacttttctgcgctgccttaatttgcttgagcggccggatgagggcgccatttcgctgcacggtgaagtcattaactgcaaaaagcctgccaaaaaagacattctcagactgaggaaacagacagcgatggtttttcagcaatatcatttgttttcgcataaaacggcgattcaaaatgtcatggaaggcctgacggtcgcaaggaaaatgaaaaaaacagacgcgtacgccattgccgagcgggaactggccaaggtggggcttcaggataaactacacgcctatccgaatcaactgtcgggaggacaaaagcaacgggtcgggattgcccgggcgcttgccattcatcctgatgtgatgctgtttgatgaaccgaccgccgccctcgatccggagcttgtcggcgaggtgcttgaggtgatgcttaacattgtgcggaccggcgctaccatgatcattgtcacacatgagatggaattcgccagaagagtgtccgaccgaattgtgtttatggatgaaggagcaatcgtggaacaaggaacgcctgaggaagtttttcacaagacgaaaaaagaaagaacgaagaagttcctccgccgcgtgctgcctgattacggttatgacataaaagagcgcataaaggagcctgtcgtatgattcgtttaagcattttagatcaaagtgtcaccgcggaaaaccaaaccgcagaagaagccttgcggcaaacggtgaaattggctcaggaggccgaacaatacggatatgaccgtttctgggcggcggagcatcataacaatgaagagatagcgggatcagcgccggaaattgttctggggtatcttgccgcaagcacgaaaaaaatccgtctcgcatcaggcggggtgatgctgcagcattacagtccttataaagtggcggagcagttccgggttctgtccgcccttgctcccggccgtgtggcgctcggtgtcggcaaagcgcccggcggatttcagctgtcaaccgatgcgctgcagcgggagcttatccagcccgcccgtttgtttgaagaaaagcttgaggagctgactcatttcattcgaaatgattttccggactcgcaccgctacgcgtcattgcggccgacgccgcatactgagtatgcgcctgacatctttttgctcggcagcagcgcggaaagcgcgatatccgcggccaaactcggcatttccttcgttttcgcctatttcataaacggtgaagaggctgcgttagaaaaagcgcgccacgcctttgacgagcatctgccgaaaggatcgaaggcggaatttcaccttgcgccgatggtatttaccgcgcatacaaaagcagaagcggaaaaacacgtcgtatcgcgtgagtcggtcaaaatcattctcgaagacggcaaaaaggtgaatgtcggttcccgggaacaagcggaagcgtttctggaacaagtcacgcagccatataagctgatcacacaaaagacgggtgtgattgccgggacaaaagaagagaccgccgccgagctgagacgattatccgttcaatacagcattaccgattttgtgattttgtcgcctatcaaaaacgctgaggaaaaacgattgtcttaccggctgttaagcgaagcggtgcagccggccccacaattataggagggatgaacatgagtcatgaagtaaacgtagtggtctggagcaaacagggctgctcctattgcgatgaagtgaaaggatatttgcgggaaaaagccgttgcatacgaaacaattgatgtgacagaacgggacgaattgcgtgacgtgctgcagacgaagtacggcatccgtcatgtccccgtcgttgaaatcggcagcggtgacagccgtgtgtatcaggccgttactcaagtcggcattgatcatgtagaacgggcgcttgccgattacgaggggaaaaagggggagagaaaatgagccggacggatctaattcaattcggagccatgattcacggtgtcggcggcacaacggacggctggcgtcatcccgacgccgatccgacagcaagcacgaatgcggcgttttacaggcaaaaagcgcagactgctgaaagagggctgttcagctttgcttttattgcggacggcttgttcatttctgaaaagtccatcccgcatttcttaaatcggtttgagccgatcactattttatcggcgcttgccgcctctacaacccatcttggtttaatcggcacattttccacctcgttcactgagccgtttaccatcgcaagacagctgatgtctcttgaccatatcagcggcggccgggcgggctggaatctcgtcacctctccgcaggcgggagccgcgcgcaatcacagcaaagaaagtcttcccgaccacagccggcgctacgacatcgctcaagaacatgtggacgtggtgcgcggtctgtggaattcctgggaagaagatgccttcgtccgcaacaaagaaaccgggcagttttttgatcctgacaaactgcatcgcctatatcataaaggcgagtattttcaagtggagggcccgctgaatatcggccggtccaaacagggagagccggtcgttttccaagcggggtcttcagaaaccggccggtcgtttgccgcgcgtaatgccgatgcagtctttacgcactccaattcacttgaggaaacgaaagctttttatgatgatgtgaagaagcgggcggcggattacggccgcgacgcttccaagctgcggatctttccgggaatcagtccgattatagccggttcacaagaagaagcggaagcgaaatatcaggaattcgccgagctgataccgatagagaacgccattaaatatgtggccagattttttgacgattatgatttgagccgttttccgctggatgagccgtttcctgatttgggcgacgtcgggaaaaacgcgtttcaaagcacgacagaccgtatcaaaagagaggctaaagccaggaatcttacgctgcgtcaagtggcgcgcgaagccgcgtttccgcgaacgaactttatcgggacaccggaacgtgtggcatcattaattgaaacatggtttcagcgggaagcggcggacgggtttatcattcactctgacatcccgggcatgcttgaagcctttgtggatcaagtcataccgatccttcagaaaaaggggctgtaccgaaaaagctatccggcggatacattgcgggggaatctcgggttggatattccgatctgcaaaccaaatccgattttgagcagaaactaaatgtttctgctttttctgctgcttgccattcccgtcattacagccttttttaaaaaatatactgatttcgagatattattgttgcgaaaagaattttttgtaactataattattacagaactgatcagtataaaaaaacattcatatttcataataaatgtgtgtgtaatttgaaaacgaaagggctgtttacaatggcaaaagtactttatatcactgctcatcctcatgatgaaaagacatcttacagcatggcgacaggaaaagcgtttatcgattcttataaagaatcaaacccgaatgatgaggttgtacatatcgacctttacaaagagaacattcctcatatcgacgcggatgtattcagcggctggggaaaacttcaatccggcacaggatttgaagagctttctgaaaacgaaaaagcgaaagtcggccgtctgaacgagctgagcgatcaattcgcgtcagctgacaaatacgtattcgtcacaccgctttggaacttctcattcccgcctgttatgaaagcgtaccttgattctgtggctgtagccggaaaatcattcaaatatacagagcaaggcccgatcggcctgttgactgacaaaaaagcgctccacattcaggcgcgcggaggctattactctgaaggcccggcggctgacatggaaatgggccaccgttacatcggcatcatgatgaacttcttcggcgttccttcttttgacggtttaatcgttgaaggccataatgctgaaccgaataaagcacagcaaattaaagaagatgcgattgcccgcgcgaaagaagccggaaaatcattctgatcttaaaaaaaacctccccgccgtacggctgggaggttttttatattaaagggcaatcgtccgtttttgctcgctgcttttcatcgccgcttcaatgacacggatgacatcgatgccttcttttgccgtaacgggaagctgttttccgtttaagatgctgtccgccagcagtttgtagtacgtaaggtaagagccgttctcagaggggattgtttctgtatgccttttttcatccgctgcgattgtcagctctccgaagttgtcagggtcatcggcgccccagctgtcgtcaatcggcttttggccggctgaaagcgcctcttcctgtccgtcctttccgtatttgataaagcttgcattccgtccgtgaatctgatagcgcgggccgtttgccgcattcatagagccggattgaagaatgacctgaagtttgccgtaatggagcgcggccagaaaataatcgacggtttcactgttgtcccgctgtttcatcacatgtgccgtgacggattccggcattccgaaaagcaggagtgtctggtcaataatatgtgaaccgagatcatacagcgttcccgtggcgggtccgcttttttcgcgccatctttcttggacaaccggattgtacagatcgtagttgacttgatatgtatgaatgtcttgaagcgccccgtcccgaatcagcttttgtatcgttaaaaagtcattgtcccagcgccggttgtggtacacgctcagtaagacgcctttatcttcagccgttcttctcagttcctccgcttctgctgaagtcgccgtcatcggtttttccacgacggtgtgttttcccgccaggagacatttcatcgctgattcataatgcattccgctcggtgtcgtaacgatgacgagatcaatgtcaggatcaccggtaatgtcttcaatcgcgcgcacggcttcagcccccggcagatcacgtctgacctcatccgttctggaggtcatgacttttttgatctgataatcatcaaggacgtccaaaagcggcgcatgaaagactttacccgacaaaccatatcccaatatgccaacctgtatcgttttcaatgaatttccccctcttgatatgtgataacattatataccccgcgggtgtactggtaaaacttgtgtgttgaaaattttttacaccggattttcaagtctgtataatgaagataacgaagaaaaaaaccgaggtggaaaatggacaaacataccgagcatcaatcgttaaatcataaaagcgccaaggaaaaagaccagattctgaaccggctgaaacggattgaaggccaagtcaggggcattcagaatatggtggagaacgaacgatactgcgtggatattctcgtgcagatttcagccgtgcaggcggccatgcagaaagtcgcgtttcatctgctggaagatcacgcccatcactgcgtagccggcgccattgagagcggaaacggggagcaggcgattgccgagctgcttgatgttgtgaaaaaaatcgcaaaatcgtaaaataaaatgttttgaaataccctacaggggtatggtaacataaaaaagaaaaaacaagacgtggagggaatcatcatggaacaaaaaacactgcaagtggaaggcatgtcctgtcagcactgcgtaaaagcagtagagaccggagtgggagaactgaacggagtgacggcggttcaggtgaaattggaagccggacaggtggatgtgacgtttgatgagcacaaagtctccgtatcagatataaaagacgcaattgaagatcaagggtatgacgtcgtataaggtttatcgcgctgcgggaacgggcgcggttttcttttatcataattataccctcgtggggtttatgaagagagatgaggacattgagtgaaccgaaagaaatgaccattcaagtggggggcatgacatgcgccgcctgcgcttcaagaattgaaaaagggctgaaacggatggacggcgtcaatgacgcttccgtcaatcttgcgcttgagatctcaaatatttcctatcagcctgacaaaatcgaagctggcgccataaaggataaaattgaaaaactcggctatcacgtcgtgacggaaaaagccgattttcagattgaaggcatgacgtgcgccgcttgcgccaaccggattgaaaagcgcctgaacaaaacagagggcgttgtgagcgcaccggtgaatttcgccctggaaacagtcaccgttgaatacaatccgaaagaggtgacgccgaaagagctgaaagagaccgtggcaaaactcggctaccgattagacgggaagaaagcggttgatggagacggcggattatcccaaaaggagaaagagcagcgaaagcagctgatcaggctcatattttctgccgttctctcctttccgcttttatggtcgatggtcagccatttttcttttacttcttttatctggatgccggatatcctgatgaatccgtggctgcaatttgcgcttgccaccccggtgcagctcgtcatcggctggcctttttatacgggagcgtacaaggcgctgagaaacaaaagcgccaatatggatgttctcgttgcgctcggaacgacggccgcttacgcatacagcctgtacatgacgattgcgtctctcgggcgagacggacatgctgaggggctttattatgaaacgagcgccattttgctgactttgatattgcttggaaagcttttagagatgaaagcaaaaggccgctcatcagaagcgattaaaaagctaatgaagcttcaggcgaagacggcggcggttgagcgggacggcaaagtacaggtgattccgattgacgaggtccggacgggggatatcgtatacgtgaaacctggagaacgcgttcctgtcgatggcgaagtgattgaaggccattccgcgattgatgaatcgatgattacgggagagagcatgcctgtcgataagtctcccggaagcaccgtcacaggggcgacgatcaatgcaaacggctttctcaaaatcagagcggtgaatgtcgggaaagataccgcgcttgcacacattattaaaattgtggaagaagcccaaggatcaaaagcccccattcagcggctcgcggatcacatttccggcattttcgtcccgattgtgctggggctggccgtgctgacttttctcatttggtatgtatgggcggcgccgggacagttttctgaagcgatcggcaaattcatcgccgtgcttgtcattgcctgtccgtgcgcactggggctcgccactccgacgagcattatggcgggctccggccgtgcagctgaattcggcattctctttaaaggcggtgagcatttagaaaagacccagcgtctgacgacaatcgtactggataaaacaggaacggtgacaaacggcagaccggttctgacagatgccgtaccggcagagggaatgaacgaagaggaactcctgcggctggcggcggccgccgaaacgggatcagagcacccgctcggagaagccatcgtgtcaggagccgaaaaacgggggatttccatcccgaaactcacccggtttcaagcccggatcggttccggaatctatgcagaggctgacggcagaacgattctagccggatcaagacggctgatggaatcagagcatattgaacatgaagcgctgcttccgcaaatggcccgcttggaggcggaaggaaaaacggtgatgcttattgcggcagacggcaaagcggcggggcttatcgcagtcgctgataccattaaagaaacatctccggccgcggtgaaacgtctgaatgatatggggcttgacgtcatcatgatgaccggtgacaacaaaaagaccgcggaagccattgcaaaagccgcgggcatcggcagcgtgatcgccgaagtgcttcccgaacaaaaggcggcggaaatttcccggctgcaaaaagaaggccggcgcgtggcgatggtcggtgacggcatcaatgatgctccggcgctggctgtggccgatatcggaatggccatcggcaccggcaccgatatcgcaatggaagcggcggacattacgctgatccgcggagacctgaacggcattgccgacgccatcggcatgagccggctgactatgagaaacatcaagcagaatttaggatgggcattgggctacaacagcatcggcattccgattgcggcagccggctttctggctccgtgggtggcaggcgccgccatggcgttcagctcggtatcggtcgtgcttaatgctttgcgtttacagaaggtgaaaaaagacaaaatcggctgatgccggttttgtcttttttattgacactttattcaaagcctgcatataatagagaaaacacttatatgagtatatgctcatatatataaattcgtttacctgtattgatgttatgggaatcctattacggaaagtagggtgagtcgaaaatgaaagcagccaaaggtgaatttgtattagacggacttgattgcagcaactgtgcaaaaaaaatagaaaacggcgtaaaagccattgacggcatagacggctgtgctgtcaattttgcggcaagcaccatcacggtctcagccggcgggaaaaacgagcaatggatgaaagatgaagtcgcgaaaaaagtaaagtccattgatcctcatgtgaccgttcgttcgaagcacgaagacaaacccggtgaggatgaataccgcaaaaagctgcagctgatgttagtgagattggcggcgggcgccgttttggccgtcatcgcttacttcgcgcacacgggcgccgtccttgagtttctgctcttttttgcttcatatttgatcatcggcggcgatatcgtagccagagcgggaaaaaatattgtccgcggccaggtatttgatgagcattttctgatggcgcttgccacaatcggcgcatttatcattcatcaatatccggaaggcgtcgcggtcatgctgttctaccagatcggtgaattgtttcagggagcggccgtcagccgatccagaaaatcgatcagcgcgttattggacatccgtcctgagtacgccaatgtgaaaacggaaaacggcatggctgccgttcccccgcaggacgtcaaagtgggacaggtcatcatcgtgaatcccggagaacggattccgctggacggaaaggtgctgagcggttcctcgatggttgatacatccgctttaacgggcgaatccgtgccgagaaaagcggagccggggcaagaggtgatggccggatttatgaatcagaacggcgtgcttcatattgaaacctctaaagggtatgaagactctgccgtgtcaaaaatattgaatctggtcgaaaatgcggccggacgcaaagcgaaaacggaaaactttattacgaagtttgccaagtactatacaccggccgttgtcattgttgcggtgcttctcgcctttttaccgccgcttctcgtgccttcagccgcgctatccgactgggtgtaccgcgcgctgattttccttgtgatttcttgtccgtgcgcactcgtcgtctccattccgctcgggtttttcggcggtatcggggctgcgtctaaagcaggggtgctcgtgaaaggcagcaactatttagaagcgctcaatcaggtggcatacgccgtgtttgataaaacgggaaccttaacgaaaggcaatttcgccgttactgatatcaaaccggcggcaggatttacgaatgacagcctgcttcatgcagccgcgcttgcagaagtccattccaatcatccgattgcttcttccatccgcgaagcttacaatcaaccgctcgcggctgaggagattgaagaatatgaagaaatacccggacacggcattcgggtgaaaaccggcggatcaacgattttggccggaaatcaaaaactgctggcaaaagaacaaatcgcttccggcacagctgaaaataacggaaccgtcgtttatgtcgccgtggatcagcagtatgcgggggcaatcgtgatcgccgatgaaatcaaagaggacgccaaacaggccattgccaatttaaaagcgctcggcgtgaagcggacagtgatgctgacgggtgattcaaagcagaccggagaagctgtcggcctcgagctcggtattgatgacgtgtacacagagcttttgccgggtgacaaggtagaccgcgtcgaagaacttgaagcggcgctttcaccgaatgaaaaactgatgtttgtcggcgatgggattaatgatacgcctgtgcttgccagagctgacatcggagctgccatgggggctctcggttctgatgccgccgtcgaagcggccgatgtcgtcctgatgacagaccagccgtcaaaagcagccgaagccatccggattgcacgccgcacacgccggatcgtctggcagaacatcggatttgctttaggcgtaaaaatcatttttctcttgcttggcgcattcggattcgccaccatgtgggaagcggtcttttcagatgtaggcgtcacgctgatcgccgttgccaacgcgatgcgcgtcatgagagtgaaagcggaataattgtcaaagataattcgtttttcagggttttcttaaacaaggttgtcttggtaaaatagagaagcgggccatccggcatccgcttcttttttattttaaaaacaatgaggtgtctgagtgaaaaagaaacaatcgtctgcgaaatttgcggtgattctgacgttaatcgttgtcgttttatttgcggccatcgtaattattaacaaccaaacggaaaaagcgggcgaaacagtcgccgaacagccttccattaaaggacagcccgtgctcggcaaagacagcgcgcctgttacggtagttgaattcggagattacaaatgtccgtcatgcaaagtatttaacagcgatatctttccgaaaatcaaaaaagattttatcgataaaggcgacgtgaaattttcatttgtgaacgtcatgtaccacggaagcggctcgcgtctggcggctcttgcttcagaagaggtgtggaaggaagacccggcatcattctggactttccatgagaagctgtttgaagagcagccgtcaagcgaacaggaatgggtcacgcctgcattgcttgaaaaaacggtcaaaagcaccgcgaaaaaggttgatcctgacaagctgaaggaaaaccttgataaagaaaccttcgcaaaagagctgaaagctgacactgacctgaatgataaattaaacattacggcgacaccgacgatttatgtaaatgacaaggtgattaatgacttctctaaatatgatgagatttcaaaaacgattaagaaagagctgaaaaatgaaaaatagaatcgtgtttttatatgcttcttgggtgatagctcttgctgccatgctcgtcagcctttatttcagcgagatcagaaaattcataccgtgcgagctgtgctggtatcaaagaattctcatgtacccgcttgtcctgattttaggaatcgccaccttccagggtgacacgcgcgtgaaaaaatatgtgctgccgatggccgtcatcggcgcatttatatcgaccatgcattaccttgagcagaaggtgcccggtttcagcggcatcaagccgtgtgtctacggcgtgccttgctcatctgaatatattaactggttcggtttcattaccattcctttcttggcattgacggcatttattctcattattatctgcatgtgttttgtcaaaacggaacgcacggcaaaataaagagcctgctccatgggagcggctctttttctattatttgtaccaagctttgtttgtcgcaatctgtctgttatgggagctgtcccaaatatccacggaataggcataatcataattcatgacgcagcggatgccgctgccttgggcgtcatgctgaagtccgaagttatgggaaaactcgtgctgtgccgctttcgccgtgttggccgttccttgatcaaggttcacgctgaaagccgggccgctcggtttgccgttatatacatacgcgataccgccggcgtcaaaactcgattttgcggtaaaaccgacgacaaaatgataattttgatttctgaagctgctttggagattcgataaaatctgagaactgtttgagccggaagaattccaagcctgcacggcctgtacgacgaaatcaatgttgtgatcacggttaaaagcgacatccgcctgctccacgatctggacgattcgcgtttgccagtcgctgtatttggcgcggtattcagcgtccgccaccgccagcactctgaccttctgggagcccgtgctggctttagttgaggctttatcctgactgacattggcattgaatcgtttcgtgccggcctgcttgccgttctcatccagaatttttgtgtcaaccgtctgttcaacttggaccgggcctttcagatctttaaaatgatcggctttcggaagcgggtccgtatacaccgttttcgccggctccgcatgagtgtgcgaatgcgtatggctttcggctgacggcaggccgggaattaatccggcggccaataaaacaggaaaaacaagtgaactgattttcatctcataaccccctttttgttagagaaagtattcaatgaaacttccaataaaccttccattaaagtataaaataggaaaatattcttgctttcagccgttgcggatgaggttgtcccggatcaggaatcagaatctttcaaaaataaggttgattttaagagaaagcgattataaaatctaatggtcgtcagaaaatttaacaaataaaaaggagcatatggaatggcctgggagctgcttagtgtaatcggcatcattgcgtttgcggtcagcggagcgattgttgcgatggaagaggagtatgatattttaggcgtgtatatcttggggattgtaacggcgttcggcggcggagccatccgaaacctgctgatcggtgttccggtctccgccttgtgggagcaaggcgcgttttttcaaatcgctctcgcatcagttacgattgtctttttgtttccgaagctgctgttaaggcattggagtaaatggggcaacctatccgatgccatcgggctttcggcgtttgccatccaaggcgctttatatgccgtgaaaatgggccatccgctcagtgcggtgattgcggcagcggtcctgaccggcagcgggggcggcatcatacgggatttgctcgcgggcagaaagccgcttgtgctcaaggcggaaatttatgcagtctgggccgcgctcggagggttaatcgtgggcctcggctgggccggggatgccgccggtttgtatgtgctgtttcttgtgcttgtggcatgccgcatctgcagttatgtgttcaggtggcgcctgccgattcgttcctatcatatagaacagtaaaaaaaccgatttcacaaacgaaatcggtttttttgcataacggcttctgataaaaaaagacgcccgatatgataagaaaaagggtatttgaccataatgctgaataatatgttgcatatatgtttgtatgatgaaagccggacttgtcagcttgatgtcggaggtgccgctgatggcaaaacgtgataaagagtggaaagaagagcaggaaagaatcaattttgtcatgaaggaactggaacagaaacaaactcatcttgaagcctcatcgggcggattgaagcaggatattgtcggcctgagaaaaacgttttgggatgatgtcaccgtgaatatggatgatgcccacgaagcggctgagacatttttaagcattaaacagcaggcggaaatgctttcagaacgtgaacggacgcatcggcttcaataccggcagcttcaaaaaatccaaaagctgaaaacctctccttacttcggccgtgtcgattttacggaaaaaggggagtcctcttccgagcggatttatatcgggctgacttctttaatggatgaaaacaacgagcaatttctcatttatgattggcgcgcgcccatctcatctctttactatcaatattccccgggaaaagcccgctatgaagttccggaagaaacgatagagggagacatcacactgaagcggcagtttatcattaaaaacgggacgcttaaagcgatgtttaacacggatatgacgattggtgacgaaatgctgcaagaggtgctgagcggccattccggacagcatatgaaaaacatcgtgtcaaccatccaaaaagaacagaacgaaatcatccgggatgaaaaaagcaaatatctcatcgttcagggagccgccggaagcgggaaaacatccgcggcgcttcagcgggccgcttacttgctgtaccgcgggcgcggggtgcttgatgcccgtcagattgtattgttttccccgaacattttgttcaacagttatgtgtccgccgtattgccggaattgggagaagagaatatggagcaggccacctttcaggaatatatcatccgccggctcggacgaaagtttgattgtgaaagcccgtacgagcagcttgaatattgcctgactgaacaaaataaggacgcactttccgtaaggctcgcagccattgcttacaaagcgtcatcagcttttcaggccatgattgaccgctatgccgggtcgctttcggtctcgggcctgaaatgtaaacagatcagcttccggggagacatcctgatttcaaaagagcggattgaagcctatttttattcgcttgatcagcagctgccgattccgaacagagcggagctgacggcggaatggcttctcgcggaaatcagcgctctcgaaaaaaaggagcgtaagaaggaatgggtcttgcaggagagcgagctgcttgataaggaagactatgctgaggtttatcaaacactcaagaagcaggcggcagatgatgaacctgcatttgacgaccatcagcgcgaacagcgcctgcttggcgccattattgtcggcaaagcctttaaaccgattaagcaggccgtcagacggctcggctttctcgatataaaacggatgtatctccggctgttttcagactggggagctgatgaaaagcccgatcattgggagagcatcggcgctttgaccggaaacgcatttgcagaacggtcgcttccgtatgaagatgccgctccgtatctgtatttgcaggatctgttagaaggaaaaagaaaaaacacacaaatgaagcacgtcttcattgatgaagcgcaggattattccccatttcagctcacgtatattcaaaccatcttcccggcggcaaagatgacggtgctcggtgatgtcagccagtcgatttatgcccataccattacgggcccttcttccctcgccggctgctttcgcaatggtgcagaaaagtatgtcagcctgaagcggacttacagatcgacgcggcagattgttgaatttacgaaagcgctgctggctgacggcgatgacattgagccttttaaccggaacggggaaaaaccgcgtgttttgcggacggatacagaaaatgcgcggcgggaacaattggcggatacaatccgggagctcagacaaaaaggctgggagacggtcgccgtcatctgcaaaacggccgcggaagccaaaaaagtgtttcaggcggtcagcgccgagagcggtgtccgtttaatcaataaagaaaaccagccttttcaaaaaggggtatgcgtcattcccgtttatttggcaaaaggcattgagtttgacgccgtcatcgccgctgacgcctctgctgcccagtacaatagcgaacatgaccgtaagctgttatatacggcctgtacgcgggcgatgcatcatttgaccgtattgtctccgggagaaccctctccttttataaaagaagtgcccgccggcttattcgtataagccctttgctgagtgcaaagggctttttatcattagtaatcttaatcgttgtcatcatgattatatattttacttacatacaaactttcggtaaagtttcaattagaatattattttgacaattcctatagaaataacgtacgttacgtttaattccttgtgaggtggatatcgttgcaacttcaggtcatgaacagtccgtttaatcaggagcaggcagagctccttaaccgccttctgccgaccttgacagaatcacagaaaatctggctgagcggctatttggctgcggcccggtccgaatccggtgaaacagccgcgcccgctgctcaggctcctgctgaaagcccggcagtctcgaaagaagtgaccgtattatacggatcgcaaacgggaaatgcggaaggtcttgcgaaacagacggtaaagacgcttgaggaacggggattccaggtcaccgtcgcgtcgatgaacgattttaagccgaataatctgaaaaaagtaaacaatttactgatcgtggtgagcacacacggagaaggcgatccgccggataacgcgctggcctttcatgactttcttcacggcagacgcgcgccgaagcttgaagagctccgttactccgttttggcgctcggggacagctcgtatgaatttttctgccagaccggcaaagagtttgacgagcgtcttcaagagctcggcggcacccagcttgcgccgcgggttgattgcgatcttgattatgatgagccgttttcggaatggcttgaagcggtcatcggcggtttgaacgaaggagcgggaaatcaaacagccgaagcgcctgccgagacgcccgctctcggtgaatccgtttattccagaacgaacccgtttcgggcggaggttcttgagaacatcaatctgaacggacgcggttcaaataaagaaacacgtcatctcgagctttcgcttgaagggtcgggcctcgcgtatcagcccggagacagcctcggcatctatccggaaaatgatccggcgctcgttgatgagctgatcaatgagctgaaatggaatccggaacaggaagtggcggtgaataaacaaggagagcgccgtccgctgaaagacgcgcttacttctcattttgaaattaccgtcttaacaaagccgcttttgcaaaaggccgcacagtttatggctgatcaaaagctgagtgaacttctggccgaaggaaacgaagagcagctgaaagcatacaccaacggccgtgatctgcttgatctcgtccgggatttcggtccgtgggaagcttccgcggaagactttctttcgatcctgcgtaaaatgccggcccggctctattcgatcgcaagcagtttagaagcgaatccggaagaggtgcatctgacaatcggagcggtcagatatgacgcgcacggcagagaacgcaaaggcgtctgcagcattctttgtgcggaaagactccagccgggagatacgcttccgatttacattcagcacaaccaaaacttcaagctgccggaaaatccggatacaccgatcattatggtcgggccggggacaggcatcgcaccgttccgttcctttatgcaggagcgtgaagaaaccggagctgaagggaaaacatggctgtttttcggggatcagcactttgtcactgattttctgtaccagacggaatggcaaaaatggctgcaaaacggtgttcttacaaaaatggacgtcgctttttcccgggattcggaggaaaaagtatatgtgcagcaccgcatgaaagaacaaagcaaagagctgtatgaatggctgcagcagggagccgccgtatacatctgcggtgatgaacagcatatggcgcatgacgtgcaccaggcgcttctcgatatcattcaggaagaaggcggcatgagccgtgaaaaagcggaaagcttcctggcagacatgcagcagaaaaaacgctatcagcgtgacgtatattgattttggtttgaaaggagcttattcagcatggtgaacaacattttaaaagcgccggaaggccctccaagtgatgttgaggaaattaaagaaaaaagcgattatttgcgcggcacattgaaagaagtcatgctcgaccggatttcagccggcatcccggacgatgacaaccggctgatgaagcatcacggaagctacttgcaggatgaccgcgatctccgtaatgaacgtcaaaaacaaaagcttgaaccggcttatcagttcatgctgcgtgtccggatgccaggcggcgtgtcaactccggaacaatggcttgtcatggatgaactggcgcaaaaatacggaaacaatacattgaagctgacaacgcgtgaaacgttccaaatgcacggaattttaaaatggaacatgaaaaaaacgattcagaaaatcaatgcggcgctgctcgataccattgcggcctgcggagatgtcaaccgaaacgtcatgtgcgcttcaaatccgcaccagtctgaaattcatgcggaagtatacgaatggtcgaagaaattgagcgatgaccttcttccgcgcacgagagcctatcatgaaatctggcttgatgaggaacgtgtggcgggaactcctgacacggaaacggaaccgatgtacgggccgctgtatttgccgaggaaattcaaaatcggaatcgccgtgcctccgtccaatgatatcgatgtcttttctcaagatctcggcttcattgccatcgtggaggaaggccgtcttatcgggttcaacgtggcaatcggcggcggtatgggaatgacgcacggcgatacggccacttatccgcagctttcaaaagtcatcggcttctgcaaaccggagcagctgtatgatgtagcggaaaaaaccattacgattcagcgcgattacggaaaccgttccgtcagaaagaatgccagattcaagtacaccgttgaccgtctcgggctggaaaacgtaaaagccgagctggaaaaccgcctcggctggcagctggatgaagcgaaaccttatcattttgaccataacggcgaccgttacggatgggtgaagggcgtaaaagggaaatggcactttacgatgttcatcgaaggcggccgcgtcacggactatgagaattataagctgatgacgggattgcgtgaaatcgccaaagtccatacgggagatttccgtctcacctctaatcaaaacctgattatcggcaatgtctcgagccagaaaaagaaacaaatcagcgcattaatcgaacaatacggtctgacagacggctggcagcattccgccctccgccgcagttcaatggcttgcgtcgcgcttccgacatgcgggctcgccatggccgaagccgagcggtatctgccgaagctgattgataagattgaagacattgttgacgaaaacgggctccgggatgaagaaatcaccatccgtatgaccgggtgcccgaatggctgcgcccgccatgcactcggcgaaatcggatttatcggaaaggcgcccggaaaatataatatgtatttaggagcggcgtttgacggcagccgtttgagcaaaatgtaccgggaaaatatcggtgaagaggaaattctgaatgagcttcgcaccattctcccgcgctacgcgaaagagcgtgaggaaggcgaacacttcggcgatttcgtcatccgcgccggcatcattaaagcgacgacagacggcacgaattttcacgaataagatgagctcttaaaaccaaggatagagacacactggcggtgcgttctctatcctttactaagcagcataaacgctgctccgcgtcatgaaacagatgacgcagcttgcgaaaaagcctgttttcagagaaaacaggctttttctttttccggaaaaaatgtagctgaaggcaaaaaaagttcgccgtgagcgcgttatgagaaattttaaataaaaacgggtaaaataaaaggagaatggttgcgtgcggaaaatatattgaatctgcccgatcatcggctccggcctttgacaagggcagagaacaggcaataatgatatgatgcagcagatgaaggaggtcagctttggacatatttttagtcgtactcgtacttttaaccattatcgcgatctcaaatatcgtaaatcggtttgtcccctttatcccggtgcctctgattcaggtggcgctcggtatcattgcggcgtcatttccgcaggggcttcattttgaactgaatactgaattgttttttgttttgtttatcgcgccgctgctttttaacgatggaaaacggacgccgcgtgcggaactttggaatttaagagcgccgattctgctgcttgcgctcgggcttgtgtttgccacggtgattgtcggcggttacacgattcattggatgattccgagcattccgctggccgccgcgttcgggctggcggcgattctgtcaccgactgatgttgtcgcggtcagcgcgctgtcagggcgtgtgaagatgccaaaaggcattctgcgtctccttgaaggagaagggctgatgaatgacgcatccggcctggtcgcttttaaatttgcgattgcggctgccgtgacgggcgcattttcgctggcgcaagccgcgttcagtttcgttctgatttcagccggcggtttactcagcggtgtcgtcatttcttttttgattatccgtttccggctgtttatgcggcgcctcggcatgcaggatgtcacgatgcatatgctgattcaaattctgacgccgttcgtcatctatctcgcggctgaagaaatcggcgtttccggcattttagcggttgtggccggcggcatcacgcatgcggtggagcaggaccgtcttgaatcaacgatggtcaaactgcaaatcgtctcttcaagtacgtggaatattattttgttcattctgaacggtcttgttttcgttattttaggtgcgcaaataccggatgtggtttccgtcatctttaatgataccgcgtttaacaatatgatggtcatcgggtacattatcgtcattacgctgacgttaatgattctcaggtttttgtgggtgctgtttttttggaacggcaagtggttttttaacaaggatcagagcatttataaacccggcctgcgctcgaccctgctgatttcggtttcaggcgtcaggggagcggtcacgcttgcgggttccttttccattccttacgtgctctctgacggctcaccgtttcctgaacggaatttgattctctttttagccgcgggcgttattttgtgcacattggtgctggcgacaatcgttctgccgattttgacagataagccggaagacaatgtgaaagaaaagaaagtcaaattgctgacagcgagacggaagctgataaaggctgccttaaccgccattaaagaaaatatgaatgagtcaaacaaaacggcttcttttgcggtcattgccgaatacaatgagaaaatgaaaaatctcaggtttcagcagttcaccgtcaaaaaccgcacgaaaaaagatgagcggaaagtccgcgcccaagggattcaggcagaacaggaagaattgctgcggctgattgagcggggcgacataccggaagaaacggctgacagccttcaggaacggtttgatgaactggaagtgctttatacgaacccgtttaaagtcggcttatctaagaaaaagctgaaacgcctgatgtactggatctttttcggcgaacataaaaaaccggaaatgtcgattttaaatgaagaaggcctcattcgctccacaagggttaaaacggcaaaagcggccattgaaagcctgaaaaaacacatgactgaagaaaataaagatgtgacgcttgccgtcatttccttttacaatcacttgattttcaggctggggcactcgtatcacgaacagagtccgagtcgccgttttgaaaatcaaaaactcgaaatcaaactgcgggccgtgcaggccatccgcaacgaaatccaaacattattcgaagagcgggaaatttcccgcgacatgtcgcatgagcttcgccaatacatcaatgatgtggaagcggccatgcttgacggagatgaataaaaaaagtccggcatctgttcgccggacttttttagattacggacgatggaattcgacgtgatcgccgtcgcggtcaaaccagcctctgaaggcccagttgatccagccgccatctcctttgttggtgaagcttccgtcttcaaacacccaaatgccgtacgtgatgccgtcataaacggcggaaccgtaaaactgaacgccgttaaaatgatcttcatattcctggcttaaattaaacaccatgacattatatttttgtccggaagcgtagaatgaagattccattaagtttttgacgaagccgtcacggttttgcgccgacttaatcgcgtcagcaatcgaattgccgatgccgagcaggtcaacgtcaatgtttaatccgacatcttttgctgagacatctgatgtttgctgagccatgttttgaggggccgggttttcttttgcggatacaaaggacagaggagtcagagacaaagcggcgccaagggcaacggacatcgggatacgcatacgtttcatatgatttcctccttcaattgtgtggtggctacagtagcgatttacccggacagttacctgattaaccgtaatttttgaaaaataggaaaataataacgtcagtggtgcttgggcactaaagatggtttttgtgataacgatgagcgtataattggtttcttacggcggaaatgtgagataataataaccgtttacataatgactagaaaggatggttcaacgtggcaaaaagcttaaaagatactgtaaagcttcataatggcgttgaaatgccgtggttcggccttggcgtcttcaaggtggaaaacggaagcgtagcggcggactccgtcgaagcggcaatcagaaacggctaccgcagcattgatacggcggctatttataaaaatgaagagggtgtcggcgaaggcatcagagctgcgggcgttgccagagaagagctgttcatcacgtcaaaagtgtggaatgaagatcaaggatacgaaacgacacttgacgcgtttgagaaaagccttgagcgcctcggcctcgattacctcgacctttacctgattcactggccgggcaaggataaatataaagacacatggcgcgctcttgaaaagctgtacaaggacggcaaaatccgcgccatcggcgtcagcaacttccaagtgcatcatttagaagaactgctgaaagatgctgaaatcaagccgatggtcaaccagattgaattccacccgcgcctgactcaaaaagaagtaagagatttctgcaaagcgcagggcattcaagtggaagcgtggtctccattgatgcagggacagctcctcgataacgaagtgctgtcacaaattgcggaaaaacataacaaatcggttgctcaagtgattttgcgctgggatcttcagaacgaagtcgttaccattccgaaatcgattaaagagcaccgcatcatagaaaatgccgatatttttgatttcgaactgtcacaggaagaaatggaaaagatcagcgcattgaacaaagacgagcgtgtcggcccgaatccggacgagcttctgttctaagaaaaaacagccctttacggggctgtttttctttacataaatgtctgtgtctgacgttttacgctgaacctgtatgcggctattaataacagggcggcggcgaaggctcccaaaatgatgatgttcagcgtcaggctttggagcgtgcggccgtgctgcaattgatcgaccgtatcaagcacccagcgctgaggcagaaattcggcgattgtctgcactgttttcggcataatattgcccggaaaaaagcagccggcgagcaagcatgtcggtacaacgatcaagttcaaaagcgccgatgccgaagagctgctgttggaaaaaccgacggcaataaaggcgatcccgattgcgcttaatgcaaacagcatcatcaggacgaacagctgccacagcgggaatgacggatgaatatgaaaagcggcgcccataaagagaacggcgaatataatttggacggccatgataatgatattcactgccgcattcgccaatacatactgctttgacgtgatcggcgttgacagaagcctgtagtacgtcctgttttctctctctttaatcatcagttccgtcaggttgccggcggaatagagcataatgataatgagatacccgatgactgagtaagtcatttctttatggttcgaagtatctttcaaaacagcggactccgtttgaatcggagaatgcttgaaatcggcgtacatcgcctgaaaggctttctcgtctccgccggaagatttgccgattgaggcggcgctgttcatataattgtacaaataagagctgacatatccggtgacctgggcgcccttcagcgaggtcatgccgatgtgagacggtttcccgtcttttacgctttgggagaagcctttttcaaacgtaatgagcgcctccatttttcctgaagcgatctttgatgaggcggacgcatccgtttcctccgaaatcttcacatgatccagtccttttaaaaacgtgaccgtatcctgtgccacttctccgccgtcctgatcgagaatgccgatattgagcgtttcggctccgccgttggcattggtcatgaaggagaggaagacgccgatcagcggagccccgatataaagaatgagctgttttttgctttttgtaattcctttgagagtgtgtgcaaacagccaccagaagtttttcatattacagtccctcccgtctttgaaacgtaaatgcggcgatcagcaaaaagagtgccgccaatgctgtatttaaaccgagtgcaggccatgccgctgatacatcatttgcgtaaatgatgttgttaatcgccttattgatccaggataagggcgacagggcggaaatcccccctccttcatatttgtaataggcgccgccgataatggacatcacctgcacgatgatgacggtgattaatctggcgctttcgggttttctggtcaaatagctcaggctgagcccgaagctgacggccaaaagaatttcagaaacgagaatcaacagcacaagtcccatgtggctgccccagttcgctttcaagataaatttgctgaaggcgacaacggcaagaatcgtcagaacattcacagccaaaatgccgagcatctttccaagaaagatatcgcttttccggagcggggcggcgatcaggcgatccgcggtgtgccgtattctttccccgcggaataaggagcttgcaaaaatcgaggcgtacagcccgatcatcgtcgtcatggatatcgcgtaaaaatctttcgccttcggttcttttgctttgtgtaaagacgtctgcttcatataatcgcttttgatttgtccggcggaaggtggcttatgcgccttgtaagcggcggcgcctgctttgtattgattggtaaaagcggtcagcatgccttggacgatcgtgccgttgatgccgctccggtcatttgtatagacttgaaaaccggtgttttttacagtgacgaaagcatccgcctgattttcacgaacctcgtttttgccttttgcctccgtgtccgctttttgaaaatagacatgctcttttttggcgtttttcataaactcagtaaagtaatgagaaagtgtcccgtttgattggtccgtatatacgaccttgatgttcccgaccgtcacctctgaatcaaaggcgtttgataatgccgcggtaaaaatcagcatgaagacgatcggaaaagcaagcatgaaaataaaagtccgtctgtcgcggaaactgattttgatttctttcccggcgatgtgcagaatattcatttgcaatcctcctttcaatagggtcagtcgcgcagacttctgcctgtcagcgtgagaaataccgtttctaagtcaggtgcctgttcctgcaaggagcggatttcaatgcctttgtccatgaagtaccggatcaggcggtttaaattgttgacccctgtgtcagagctgattttcacgctgttttcttccagtgcggcggctctgacgccgggcagctcctgaatatcgccgaggctgatgccgtttccggatgacagctcaatcacgacgtccttcgtgtcggtaatgatggaggtcagctgttcttttgtgccttcggcgatgacttttccgtggtcgatgatggcgatgcgtgtgcatatttcttccacttcctccatgtagtggctcgtgtaaatgatcgtgcagcccatttcattgagctttttcactgattgcagaatataatttcttgattgcggatcaatgccgaccgtcggttcatccatgatgatcagtttcggccggtgggcaagggcgcaggcgatattaagccggcgtttcattcccccggaaaaatgcttcggcaaatatttgtgtttatcgctcaagccgacgaatgtcagggcttcctcgacccgttctttcagagccgcccctctcaggccgtacagacctgcgaagaacttcacattttcataggcgtttaattcctcgtaaatcgcgaggtcctgagggacgatgccgatattcattttcgttgctttgctatatttgaaaatatcttttccgagaaacagaatgtctccgcctgaaggttttaaaagacctgagatcatattgatcgtcgtgctttttccggctccgtttgcgccgagaaacccgaaaatctcaccttcttttacggcaagcgacatctggtcaacggcggcataatcaccgaatttcttactcagctgtttgagctccaaaatgttcatgtttccacctctatgtcttatgatgctcttattataaaaaaaagaatgaacggccgttagtgcagctgttcattcctttgacatgagaatcttcatatttttcacatgaaaacattcacttattcaaccggaagcaatgtcgtgacggaaaaaccggccgtgccgtcaaaaataacggttccgtgcaggacggccgcccgttcttccataccgagcatgccgaggccttttttaaagcggacggcgccgtttccgttatctttcacttccgctttcacggctttattcagcacatggatatcaatgaaaatctgcgtggcatcggcgtatttcatcgcattggttaaagcttcggttacgttttcctgaatgactctccaatgcatttgcgtcagcctgtccaaatcgccttgatgcgtaaacggaaccggcatcccgtttttggccgaaaattcatcaataaacgttcttaatctgtgaatgcccatttgttcagcgggcggtttcatatttttcagcgttatgcggatatcctctatgccctctttggaaatggtaatggcgttttggagcagttcagccgctttgtccggatgggagccgagcatccgcttcgccgcttccatctgaatgagcgcgccggtcatcgaatggccgattttgtcatggatggcttgggacaatctgtttctttcctcgagtttgccggtgtactccgattgtttgatatattctgtgctgctgtgcagctgtttcgtcagtttttcaatgcttgagcgcatgctgtccgactgttcttcatatttcttcagccgattgccggaccgggcggccaaaacgaaaatcgccagacagaacaaggttatgacgatataagtcggaaggtcgccgtacgggataaataaaaacggcaaaaacacgagcaggcagaacacatagcggtgaaccggatattcggcaagaaccgcaaaaatggcgggcggcaaaagaaacagaaacgccggatggcctaaggcggaaagccaagcggtcaatgccagcgtcatgagggtgatcccgcgcctccaagcgggcggcctgatcatgcagaccgcgatgcccaaagacagataaagcagcagaaataagacggcgtacggcgtgtaagggcggtctaccgatacgaacaaaaaagccgtataaaaaatagcgatcagtctgctcatcagcatccaaaaatccataccgttcaacgcccgttatccaccttcccggtgatataaaaaatggcgatctgcgttctgtgctcaagccccgttttccctaaaatagatgaaatataattggccgtcgtcccttcagaaatgaaaagctgttttgaaatttccctgttcgagaatcctttcgcaataagcgacatgatgctgagctctctttcagtaaactggctttcatcaatctgatgcgcggcttccgccggccggaaaaggctgtcttttattttgtccagcacggtgtcctgaagaatgctgtgcccgttgaaaacgcttttgatcgcatcgcggatccgttccggttcggtgttttttaataaatatcctttcgcgccgtttttaattgcttctaaaatatactcatcgtcgtcaaatgtcgtcaggatcatcggcttcgtatccgtttcctcagcgatccgttttgcggcttcgacgccgttcatcaccggcatgcggacgtccagcaaggcgatatcgacggggttgtgcttacaatactctgccgcctcgagtccgttttccaacgttgctgatacagtaaattcctcatatgtatgcaaaatgattttcattccttctctgatgaaagaattatcatccgcgataatgacattaatcttcatagccgcaccctttgtgtgtttttgtttcattatataccatccgattttaaatcaaaaagcctcccggcgaaaggtgcgcggaaggcagatcggtcaagcgggctttttcaattggatgaaaaacagcatcagaaaagaaatgatcacaatacagatcacccacacccaggcgagtgtttcattgccggagtccatcgcgacgtaaatcgccgtcggcagcgtttgggtgacgccgggaatatttcccgcaaacattaaagtcgccccgaattcacctagcgcccttgcaatactgagaatgcttccggtcaagagggagggaaaggcaagcgggacggaaatacgggtgaacacctgccacctgccggctccgtctactttcgccgctccctcgatgtcagcatcaaccgcggcgaagccggttttagcggactgatacataagcgggaaggcgacaatggccgaagcgatcaccgcggccgaccacgtgaaaatgacgggctggtgaaaaatccgctcaatcgcccggccgataaagctgtgtttcccgaaaatgataatgagaatgaagccgacaacggtaggcggaagaacgagcgggagcataaacagggtctccacagccgtttttccgggaaatcgcgctttcgccatccaggcgccggcaagcgttccgagaatgatgacggcgatgcccgacgccaaagccacctcaaatgacagtacgacgggagtgaaaaactccgaagccgtaatgttacttggcagtaaatccatatttcttaaacactttcatcgcttcatctgactgcagatactgataaaacgcttctgcttctttacggtgctttgtatccttgacgatgccgacaggatacacgatcggatcgtgcgttttcgccggtgcttcatcggtgattttcacctttttcgaaatcagcgcgtctgttttatagacaagcccggcatcgacatttccggtttcaacataagaaagcacctggcggacgtcttttgcatagacggctttatcttttaccttgtcccacagggataatgccgtcagtgactgtttggcgtattgtccggccggaacggattcaggcgtgccgagcgcgattttttccgtgctgtcttttttcaggtcattcagatgtgtcaggtgtgcgctgtttttctcaggcacgatcatgacgagatcatttttcaaaagatccgtgctgtcctttttgtcgatatctccgtcatgaacgagcttttcgaatttatcttcggctgccgagaagaataaatcagctcccgcgccttgtgaaatttgtttttgcaatgtgcctgatgatccgaagttgtcttgaatggttacgtttgaatgtgatttttcgtagttggtctggatttcttcaagtgcatcctgagcgctggctgctgcagaaacggtcagcgtgacgttttcgttttgtccgcctttggacgattgtccggatgagcagcccgcagttgcgaggaaaacggccatagccgcagttgtgagtagtgtcgctttctttttcaacattgtgcaccccttatagctaaatatcattagatcaaactaattataacgcaattgtacgtgatggtgcggttttttttcaatatctgaacagttataataaaaacggagcgtgataatatgacagaagccacttcctatacaatagaagaagttgcgggccttttgaaggtctccaaactgacagtatatgatttgataaaaaaaggactcattccggcgtacagggtcggaagacagatgagggtcgatgaagaggacttaaaacaatataaagcaaacatgagaatgtcaaaaaagccatccgcagcagaagcgcctgacccgtcacgcgggcgggagccggaaaaaaggcagtctgttatcatcagcgggcaggatgtgtcgatggacctcctcagcaaacagctggaacaaacaatacaggcggctccgctccgcaagtacagcggcagtttgaacagcctgatcgagatgtaccgcggggcttgtgacatcgtcagtctgcatttatacgatggggagacggggcagtataacatcccgtatgtgaagcgcattctttcaggggagccgtttgcgctttttcatgtcgtgctgcggcaggccggattatatgtgaaaaagggcaatccgctgaacattcagggctttcaggacatgagccgaaaggatgtccgcatcgtcaatcgcgaaaaaggatcaggcgcgagggtgctgctggatgaacagctcagatcattcggcatcacgccgtctgatgtcgccggatatcatgacattgtcacggatcatctgtcagcggcttcacaagtatcaagcggaaaggcggatatcggagtcgggtcgctgcatgcggcgcatatggcaggcacggactttatcccggtgatcagtgagcagtacgatgtggtcgtcttaaaacaaaaccgggagcttgttcaaagcgtgcgggacattcttaattctgaggaattcaagtctcagctttctcaattatccggatatgatacgaaaatgacaggacggctcatatatgaaacatgaaaaatccctccatataacggagggatttttttattgcttataaaaccgcagcaggtcgccgtttaatattttatcggaaagcatcagctcttgttccgctttttctttctcatcgctgcacgcgctcatgtcagaaagcggttcacccgttttacggctgtaacacgtatttttcgtataaatatggtcatccgtgataaagctgccgtttctcagcaccgcaaacggagtccgctctccggaaaacagatcattgccgaactgaatgctgcctttcgtttcaatgccgagcaggtgaagcagcgtcggccttacatcaacctgtcccgcggccgaagcaatcgtttccggcgcacggtcggtcaccccgggaatatgaatgataaacggcacgcgctgaagctgaaccgtatcaaacggagtgatttcctctttccctaagaattcggcaagtccttgattatgggcttcggatataccgtaatgatctcccatcaggacgatcatcgcgttgtcatacagcccttcttttttcagcttcttgaaaaagtgtttcagagcctcatcttcatagcggaccgtcgtcacatagcggtttaataactcgctgcttgtgtccggttcctcaatgagctgatcctgttgatcaatttcaaaagggaaatggttggtcaaagtcagcaggcttgcgtaaaacggctgcggaagcttctttaatttttccgctgactgttcgagaaactccttatccttcaggccccagcctgttgaattttcctgtgtcaccttaaattcatccgcgtcgaaaaaacggtcgattccgaatgccccgtacatctcatcccggttccaaaaggctttatgattggcatgcagaacggctgaatagtattgacggtcttttaacatatggtacatcgtattgaaccggtggccgctttttgtgaaaaaaacggcgccgcttgaagacggatacagcgaattcgcagtaatgaattctgaatctgatgtttttccctgttcagtctgctgataaaaatgagtgaagtcataacttttttttcgcagtttgtttaaaaacggggtaatctcccgtccgctgacccgctcatccattacaaaacgctgtgttgattcgagcgtaacaaagatcacattgcgcccctttgcaagcccgaattttgaatcggacggcctgctgtagccggcttgagtgtaattcgcgaccgccgcaaggctgtcttcatcggcaaacgctttagcccctgcattcagcgtctgcgaaatggtgtcatacaaatgaaagtggaacaggccgattccttttacgagcgcttcacgatcaaaagggtgcttgaacagcttcggctgctcggcctcagacagcgcaaggttgcacagcatgaggccggctgatgcccacgcatacgctttaacggtacgggcgcccgcttttcctttatcggctttatgcctttttccaagataaaacaaaatcgcaatatccaaaaataaagcgatataaagcgggtgaaacagctcttggacgctgcttcccatatcacccatattgcttgcctgaaacaaaaccggtatggtgataaaatcaatataaaacccgtaaaacaccgtattcgcgattaaaattcccgtcagcatcacatttgccgaaagcagaaagatccgctgttttttttccgtcagcaagagggcgatgccgaacagcggcacaatgaagctcagcggattaataaggagcagacattcctcaagaaccgaattgttctgcagaccgaaaccgagcttatacacggcataggttttcatccacatgaacaggatggacaggcataaaaaccgatgattgctgaaaaaggttttcttcatatgtatgactcctcaccctaaaagcgaaaagacgctttttgtttaagagatgcggccgtgaaccagttcgtataaataatagcaggatacaatcgttaagccggccagcacaagctgctccgaaaagctccccgttctcatataaaggggaagacggaagcggatggcggacggaaacagcagtttaatgccgttgacggtccatgcgtcaagtacaagatggcttgccattccgatcatcagtccggcggaaatgctcggattcggaatataggttgccgtaatgaaaaacataataagcataaacagcaggctgtgtgtaaacgttctgtgcccgaacaccgtgcttacgactttggacagaacgggcagcgtcctgccgattttgcttttcgtatggcatatgtcgggaatcagcgccccgagggcacccgctgaggtcataaggaccggatcatacccgtaataatacgcaattgcggaacaagaagcgatgcctcccatgatgtgtgtttttcctgtcatttttcgcttctcctttttatttttgccaaaatcccctgaattacaaatatatcaagagaatgcatgtttgatcaacaaactttacctgttccgccaaaaggaaggagacgcggattccgcatattctgccgcggaaaaagacacattataggtgtacctatatttgataaagaggtgatacagatggctttctttaacaaagaaaaaggaaaaaacagcgataaaaacaaaaacgtcattcaaggcgcgcttgacgacgccagtgcagctctgaaagacgatccgcttcaagaagctgttcaaaagaaaaaaaacaaccgctgaccatataagacgggtagggcgaacgctctatccgttttccatctaatatttccctttgacagatctttttatctctgataacctctgagtagaattgaatgataaaaatcctcactctttctcggtgaggtagaggttgcgcttgatgatgagtcgcacatgccaggctgataaggggccgcaaaacatgtgttaaaggcatcagcgccgaagtgtaaagaaagccgatccttctttatgctgggactgtatctgaataagtgcaggactgccgcgtgctttttcgcggagggctatccggagatcaagggtgtgtgtgtttctttaagcatggacttttgttcaggctttttttgcgtgtaaatatggtctcggggtctggtccgtacgaatgaacaaccaggaggtacaggaatggaacagacgaaaaaatggggtttttggttattaacggcgtttgtcgtaggaaatatggtaggctcgggcatcttttcgctcccgagtacgctcgcaaaaatcgcgagcccgttcggcgccacatcggcatggcttttaacgggagccggtgtgttaatgatcgcgctggtcttcggccacttatccatccgcaagcctgagctgacggcggggccgcaaagctatgcgcgtgcgctgttcagcgatcggaaaaaagggaatgctgcgggcttcacgatggtgtggggctactgggtggcgagctggatcagcaacgtggcgatcatcacgagccttgccggatatttaacatcatttttcccgattttaacggataagcgtgaaatgttttcgatcggcggtcaggcggttacgctcggccagctgctgacgtttgccgtatgtacggttttattatggggcactcacacgatcctcgtcaccagcattaacggtgcgagtaaattaaatttcgtcacgacgttttcaaaagtattaggatttatcttctttatcattgcaggtttgtttgtatttcaaacgtcgtttttcgatcatttttattttcctgttcaaacaggtcctcacacggttgagggaatcggcggacagatccacaatgcggcgatttcaacattatgggcgttcgtcggaattgaatcggcagtcattttatccgggcgcgcccgttcgcagcgcgacgtgaaacgcgccaccattaccggattattgatcgcgcttggcatctatatcatcgtgacattgattacgatgggcgtgcttccgcatggtaagcttgtcggctcggaaaaaccgtttgttgacgtattgtacgcgatcgtcggcagcgcgggaagcgtcatcatggcgattctggcaattttgtgtctgttcggaacgatgctcggctggattcttctcggttctgaagttccgtatcaagcggcgaaatcaggagactttcccgctgcttttgcaaaaacgaataaacagggaagcccggttgtgtcgttaatcgtaacgaacgtaatgtcacagatctttatcttttcggttatttcccggacgatcagtgacgcgtttacgtttttaacgacggcggcgacgctcgcttatctgattccgtatctcgtgtcagcgttttacagcctgaagctcatttttacgggtgaaacgtatgacgagataaagggttcaagagtaagagacggtatcatcgccatccttgcctgcatttattctttttacgtcattattaccggaacggccgatttaacgacctttattctcggtatcgggctgtttttcgtcggtttgctgttatatcctttcgtctcaaagaaatttgcaaacaacagaccatcggtatgacaaaaagacatctcacgtctgtgagatgtctttttttgtttgcaacagcggattactttttgacggcgtgtatataatgaatggtctcaaatgcggttaaatggtcagtgcgtccgctgaaaaaacggtcattgacgtccgccggagatacatgttcataaataagcagacctgatgattctaatattttttcgatttctttataactgaaacacgataacatcggttctccgcctgctgcagccattttcaccatgttttccactctgtttgacagtcctctttcttcaaagagcgactcatctgcataatcaaacacgatagagcttcccggcgggacttcggcaaataattgtgtgagcaggcgggcgagatgctctttcgtaaggtagtatgacacaccgagcaggctgaaaaaggttttttggcgtgaaaaaccttcctgatacagacggctgaaagaaagcgaagcggcgaagtccatcggtacaaaatgaagatgatgggaaatgtcgagattcagatgtttcaatctgtttattttgtcttcctgtgaagcgggatgatcaatttcaaatatgtctaagacgtttgtcatctcaggatgcctgaaacagaaagtatcgagccccgcgccaaggataacatactgtttggccccgagcttcacttcattcaaaagcacttcttcacaatatgcggcacgggctaacggtgtaggagacagctgtacttgagtcacccattttaagatgtcatccggttggccttgaagcctctgtgccatgtctttactgaaaaatgatataccttgaatcagatgatcgcggatgtccgaatgctctttttcggaaatcagatcttgtgccataaaatcatcaaatatcaccggggtgtcgtatttactgtggtacgcccttccgaaagcggacagcagggaagtcatactcgccttgttttctttcatataaagatcctccgttatttacatcaatctccggccgggagaatcttattatacatgttaatccaaaaatgtaaattataacataaataaatttttttgtcaagttttaagcgtaataaaaagccgctgtgacagcggcttcggggttacttcgttaagctttttgtgatgtagtcgagctggccttcaagtgagatcgggtctgagaaatagaagccgatcggatcaatgcggtagacatggttttgtttgacggcatcgaggttcttccagattgagctgtcaagcacgcctttgtcgtcaccgccggcctgccatggccccataaagatgtagtctcccgcgaagtcaggcagtttctcgagtgaaatgctggcgtagcccggcccttgattaatggctttttcctgcgtcagttttgtggccttcagcccgagtttgtcataaatgatgcttccgccgcggccgaagtctttaccgaatacatagatgtcttttccgtttgtctgcatgatggagatggtttttgagccgaccgctttttgaacctttgttttagcggcagcggttttcttatcccattcagccagccatttgtctgctttatcttcagtgcctgtcattttcgcaaactctttgaattgatcaatgttgctgagcttgtcatatttaatggcgatggtcggcgcgattttttccagtttttcaatatcggcgccttgtgtcgtccagacaacgattaaatccggctttaagtcaatgattttttcaacggacgtgccgtcgccgatgtttgtgacaccttttgttttccctttgtaataagggtttttaaatacgttttgcggcgcgccgacaacattgatgccgagctgtttaaagtcgccgtagtagccgtcagccatgacgacgacccgtttcgggtgcttcggaattttaatattgccgttttcggctttatacgtgatggtttcttctttttcagaagaaccttttgtgtctgaagaattgccgcatgcggccaaagcggcgaagagcagcacggcaatcagcgctgcgccgattttcttgtatgtatggaacatctgacattccttctttcataaaaattagtgataaagagaatcattatcagtgtgattatatcactgctttcatagagaagcacgctctttttaaagaaaaactttctttttttatatgaaattaggtctattaaaagagaagataaaagtgctatactgaaacaagtcattgataatcattatcattaccattcttgttttgagaaaggaagaacgagtgttgggtctattgaaaaagaaacagacaatgacggctcaaggggcatcagggagtgaaatccagtggacggcgcgttcattccgggctgctgtgctgctgtgtgccggtattgcggttttattgatcggcgccgctctgtctgtttccatcggagctgccgatattcatctgcggacggtgtgggatgctctctttcactttcagccgcaaaatacatctcatcaaatcatacgcgatctgaggctgccgagaaccgccgccgccgcgctcgtcggggcttttttagctgtgtccggagcgattatgcaggggctgacgcggaacccgcttgctgagccttccattatgggcgtgacgtcggggtcaggatttgcgatcgcattggcatttgctttttttccgggtctgtctgcggcgggacttgttttgtggtcctttacgggagcgggaatcggagcgcttattgtgtttggcatcggcctgtcttcaaaaggcggtctgacaccggtgaagctcgcgctggccggtacggcagtcggctatttcttaacggggctttcaagcgcgattgcgatccgttttgatgtcgcccaggatgtgaagttctggtatgccggaggagtcgcttccgtcaaatgggaaggcatgcagctgcttttggcggtcggggttatcggactattgctggcatttctgattgcgcgctcagtgacggtgctgagcttgggtgaggaactggccaaagggctcgggcagtacacatcgcttgtgaaagtaatcggaatgtttgtcgttgtcctcttgacgggggcttcagtctcagtcgccggagccatttcttttatcggcttggtgattccgcatatcacccgatttttagtcggggtagattacaggtggatcattccctgttcggcggtattcggcgccgttctgttagtcttcagtgatattgccgcaagactcgtcaatgcgccgtttgaaacaccggtcggcgctttaaccgcccttatcggcgttccctttttcttttatttggcgcgcagggaaaggagagggctgtaatgaatgtaaaatcgaaaaaaccgctggcggtcatggccgttacgtttgtgctcatatgcatcgtcttttttatcagcttaaacatgggtgtgatccggattgcgccacttgatacgatgcgtgtctttttcggacagggggatgcccgggatcagctcgttttatttgaattcagactgccgcgcatggtgctgtcattgcttgtcggcgcaggaatcgcggtttcaggcgcgatttttcaaagcgtgtctcaaaatgacttggcggagccgggcattctcggtattaacgccggggcgtctttggcggtcgttctgtttatcttctttttccaagggtcagctgttgatctaagcatggccagtacatggctgcttccggtgagcgctttggcgggggcttttctggctgcgctgctcatctatgtgctggcttggaaaaaaggcgtttcacctgtccggctcgttttggtcgggatcggtgtcaatgcggggtttaatgcgcttctcttgatttttcagctgaaaatggacccgcgggatttcatgcaggcgcttgtatggatttccggttcgatttggaacgccaattggaaaatggtgctgtccattttgccgtggctgctggttcttttaccgttcagcctctataaagccaggtatttaaatgtgctccagctcggtgatcagctggcggcggggcttggcaccaaggttgaaaaggagcggcgcgttctgctgatgtccgccgttgccctgaccgcgtcatgtgttgcggcagccggcggaatcgcttttctcggactcattgcgccgcatttggccagaaggcttaccgggccgcgccaccagacgcttatcccggtttcagctttgatcggagcatttttatttctgcttgccgatacgctggcgagaaatgtgcttgcaccgtccgaagttcccgtcggcctggtgatttccgtgctcggagcgccgtattttgtatatttgctgatgaaaacgaaatagaggaaggagactgccgcgatgaactcattatcggcggaacagcttactgtcggttatggcgaccgtttgatagcgaaagaattggatatcgccatcccgaaaggaaaaattacaacgctgatcggtccgaacggctgcggaaaatcgacggttctcaaaacgatgtcaagaatcatgaaaccgaaatccggcgccgtctatttaaacggacaggcgatcatgcaaaaatccacgaaggacatcgccaaggaaatggcaattcttccgcagacgcctgaagcgccgagcgggctgacggtgtacgaacttgtttcttacggcaggtttccgcatcagtccggaatgggccgcttgagtgataaagaccgtgacatgatcaaatgggcgcttgaagagacggggatggccgaattttacgaccggccgatcgaagcgctttccggggggcagcggcagcgtgtgtggatcgccatggcgctcgctcaagaaacggagctgctgcttcttgatgaaccgaccacttatttagatctcgcccatcagcttgaaattttgcagctgctggacaaattaaacaaggagcagggccgcaccattttaatggtcattcatgatctgaaccatgccgcccgtttttcccattacatgatcgcgctgaaaaaagggcgcgtcatcaaggaaggaacggcggaggaagtcatgactcccggtatattggaagacgtgtttcaaattgacgcacagattgtaaaagatccgcgcacgaacaaaccggtctgcttaacctacgatttaatccggcatgaaaacgcaactgtaagatgaaaaaaaacgcagagccattccggcctgcgtttttttagtgcgcccggggctgcttttgtccggagacgcatttatccaaaacgaaaaaaacccccgccacaatcagctcctccgtcgttgacagccaaatcttttcaatcagtttatccgtcgtatacgcagtcatccagaggaacagcagctgaacggtgccggctaaaaggagaaaaggcagcctgcccgtcccaaaaaaggtaaagctatgtatcatcagccgttcaagcggttcaaaacataaaccgagaagaataaaaagcacggaaaaaagcaggacgtacgccatcgatccgtagctcgtcccggctaatgaaaatacggccatcatcacgatgaaatacccgaataatacggcagcggctgccagggcataccggagcacctgaagaaaaaacattttcgtcccgttttgattgatcatctgttcagctccttttcacacagaggagacttgcagagacggaactctgcaagtcgggtgtgtatcttcagcatttctttttgacgacagggtgtttctctttcgaaagaatatccgtaaagtctttgcccagatccagatgctgctggacgaatttctcaggaagcatggcaagccattggttcagggacacatcggcatagtggtcatccttgaagatttccaggaagacgagcggctcatcccccaaattctccacatagtggcccattgcgaacgggacgtaaccgacatccccggcctgatagttaaatgttcttgcatggccgtccgatgcaaaaaccgtcatccgtcctttaccggaaatataatactgccattcatgcgtattcggatgccagtgcagctctctcattgcgcccggttcgaccacgacaagcgctgaagcgatcgttttggacactttgaagtttgtggaatccgcgatatatactttgccgccttccgtctcagcagtcggaccttcatcgagcaggcggtaagtgaacggataaggcacttcgccgttcgggccttccacaatgtcgtctttcagcttcccgggaaccggctcttcaaagatgtatttttctttccgaggcaggccggcgaggtctttttctgaaaccccgaaattgttggcgatgacatcaagcggcgtgtgggcaagccagtcagtcacttggaatgtgctgttttctgagaaggaaccgtcatcaaaaaccaagaggaattcacagccttctttcagcgcctgaatggagtgcggcaggcctgacgggaagtaccacagatctccttccttcacgtcatcgataaaactgcgtccctgttcatcaacgatcgtgacccgcgctttgcccgtcagcatatatgcccattcggcttctttatgccagtgcagttcacggatggcgcccggttttaaacgcatgttgacagatgccagattttcagaaatcggcagctcgcgaacggtcacctcacgcgcgtacccgcccttttccagccggttatgcacatctgagaaagagaatttcatattatccactgtgccgtgatccgtttccggcggcgtcagcatatccggattttggcggtctctttcaagattgcgcggaatcgtgacggtcgctcctttgtctcctctgatcggctgcgggatattgcagttgttttcttttgacatgtaaatcgtctcctctcaagctttgttttttcagaaagagaatgtgaaaggcctttcgttttcccttctgctttgttaagtgatgcgttccgatgaaaagtcaacttcgtgtgaaaattaatttttcattttctgatctttcagttccgtcatcagttcgatcagggcgtcaaacttcttctcaaaccgtgtgagaagatacatagcaatcagagccggaaagccgagattgccgatctgtctgaccgcttcttctataaaaacctgatccattgtcagccacctcctgacttgacctgcagtcatgtatataagtgaaagaaagagcggctcctgtaaacctgatatcccggttgagggtctttttttttgttccggcaaatccgggacataaggaatgcggaatcttagtcggaaaggagtagtttacttttttttgctttctttcatttaatttaaatagggggcggttttatggactatcaagttcttttacggtcaaaatgcaaggaaattatgaaacatccgatcgttaaacattttttaagtgacccaaagcattacgagaaatttaaaaatgtgctggaacattcagacgagaaggatgcaaaatcattggacgaccattttaaacagttttataaggaaatccggatcatcaaatatatgaactctatgatccggattttctccatcgattttgacaagcgcatccgtaaaaatcagaatcgctatccgctgacggtggatcagccggagggaggtgaagcgcttccctatgaaatgggaaaagacgcgtatgaagagtttctgcggaagcagggagatttgagccagcatgtccaaaaccgtgatttatacgaagcgcttcagacgttaaccgataaacaaaaaagcgtgctgacgaatatttatcttcacggagcgacgatgaaagagattgccgagtcgctgggtgaatcacggcagaacatttccaatattcataaaaaagggctcgacaatctcagaaagcagctggacaagcaaaaaaagggggaaaataagcagtgaacgggccatttgacttcaacaaagagaacacagataccgacgaaatggaacttttgatttcacgtttttcgccaatgataaaaaaaaaactgagcaatacatcataccaggaaagagaagaccttgaacaagaattgaagattaaaatagttgaaaaagcggacatgctgttatgccaggaagtgccgggtttttgggaatttattcttcatcttataaatgaaagctcctgacaaaagcggcggaatgatggatattccgctctgacaacgtgagaaaaacgagaagagatgtccgtctcgtttttcttttctgtttccccgcaagacctccgcactaaaaaggtaccaaatcttatccatataatgatatgatgaaaaaaacaaagagaaaggaacgtccaaggtggaaaatgcgtcaattttaattgtagacgatgagaaggcgatcgttgatatggtcaaacgcgttctcgtcaaagaaggctatcacaacattaagacagccggaagcgctgaggaagcgattgagtttgttaaacatgaaaccgcggatctgctcgtgctggatgtgatgatggaaggcatgtccggttttgaagcatgcaccgaaatccggaattataccgacgctccgatcttttttctgactgcccgttcttctgatgcggataagctgtcaggatttgcattgggagctgacgattatataacaaagccgtttaatccgctcgaattggcggcgcggatcagagcgacgttaaaaagaacctataagcgcgaagagaaaacggcggtaaaaacgtattcatacagccatttttcctattcgccgcaaaacgccgagctgatcgtcgggggcgagcccgtcagctgctccgcacagcttctgcaattgcttcaatatttctgtgaacaccctgatgtggtgctctcaaaagatcagatctatgaaaaagtgtggggatatccgtcttacggcgataacaacaccgtcatggtgcatatccgcaagctcagagaaaagattgaaaaagaccccagcaatccgtcttatattgtaacggtgcgcggcctcggctatcggtttattcccgatcaaggagaaaaaggaatccgctcatgagaatgcgcggaaaatttctgctccactttttcggacagcttctgcttgtcatcctgctgatgtccgttttggccgtcgcttctttcttctatttggattggcgtttcagcgaagcggaagccaatgcgggactgaccaaagcgacggcagactcgtttgaagcgtggcttgataaaaacgaagacggcacatgggatgtcgatgaatttttaaagatgtcggtcagaaagcagaagggctggctgcagatcattaatgacaaagaaaaaacggactacgcatacagagtgccgaaagacgtcccgagccattacagcagaaaagacctcttatccatttaccagtaccggaattttgacaactacaagctgaattactggacggtcacgataaatgatgagacctatttgattctgttcggctggaaatccgccagtgagcagcttctcacttacatcgaatcacaggagccatccctcgcttccctttctcaatataaaaaaagcacggttgattatattaaacgggaaaaaggggcggtctaccttctcgaaaacagcggcagactgctcggggatatcaacagcacgaaaaaagaacggaacaccgtcaatgagcttgaattgctgaaatacagttccaagccgtggaattacaaacgggaaatttcttttaaaagactcgataaaacgaaatggatggtcgcgtcggtgccgaaccccgtgtacatccccgatcacgagtttaacaaatcatttttgagaaatgtgatgaaaaccctcttcctcttgatcggaatcttagtatttatgatctgcatcctgaccatctggtactctttccgtttcggctggccgctgtttcataccatcaaatggcttgtcaatttatcaaagggccggcttgaagagccgaagaaccgcaaaggacagccggtcagcaaaaacaaaaaaggcaaaacaaaacagccgttccgctttttcgccgagattttcgaatcgatggatcagctgaccgacacgctgaagcgggataagaaaaacagagaaaaaatccaggcgacaagggaagaatggatcgccgggctgagccatgacttaaaaaccccgctgagcacgatttacggctacagcatgatgcttgaatcgaagcaatacgactggacaccggaagaagtcaaagaaatggggcagatcgtccgggaaaaatcagaatatatgtctaagctgattgaggacttaaacttaacataccgcctcaaaaacgcggccctcccgatcgaacggcggctgatcaacgtcgtgccgtttatcagaaacgtcacgaacgattttacgaaaaacacgttctcggaaggctatgacatcgcctttgaaaccaaaaaggaagacattcttttcgccattgatgaagcgtggttccgccgtattctggagaatctgctggcaaacgcggttaagcataataagaaggggaccgccattcgggtggtgcttgaggaatcagccgaacagctcattctgaaggtgaaagataacggaagaggaatggacgatgaaacgattcaccagctgtttaaccgttattaccggggaacgaatacgaaggggccgtcagaaggaacgggactcgggctcgccattgccaaagagctggttcaccttcataacggaaccatccatgtcaacagcagaatcagcgccggaacggtgattacgattctttttaaaaaagattgagtttggacgccgctttgtcgggaataacaatagaagactgacaagcaaaagaggtgttcacacatggaagcagcattacgagcagatacgagagcagttatcggagaaggccctttatgggacaaggataaggaatgcctgtactgggtggatatactgggcagccagctccatatcttcactccggctgacggaatcaaccgttccgttaaattcaactcatttgtcacggctctggccttgtattcaaaggaagagctggtgatgacgatgaaagacgggttttacctgtacaatctgcgggaagacacattgacgaagatgaagcagccgaaagacatgcgggaagatatccgtttcaatgacgcaaaatgcgacccgtccggcagattatgggcgggaacgacgagcatggaaggcaaagaagaggaggcttcgctgtaccgtctgaatacggacggcagccttgccaaaataaaagaccaggtctccacctcgaacggtttggattgggatcgggaccgaaacctgatgtactatattgatactccgacgcaggaaatcgtctgttatgcatatgatcctgaaaccggagccgtatcagatccgaaaacggtctaccgctttccggagtcgcaaggatctcccgacggaatgaccattgaccgtgacggaatgctgtgggtggctctgttcggaggcggccgcgccgtccggattgacccgtttttgcataaggaaattgcatctatcgaagttccggcgaaatacgtcacctgctgcgcgttcggaggcagcaatttgaacacgttatacattacgaccgcgacggaaaaattgacggaagccgaaagacttgagcagccgcatgcgggcggcctgttttcagcagagcttgagacgggcggctgggagccggttccgtttgcaggcatgatgtaaaaaaaagccctggcatatggggaagttccccttgtgccgggcttttttgtgttaaatggagcggatgatgccgccttcaacccgctgtgcggtgccgttaatggcagaagcagctgatgaagcgagaaatacaatcgtattggcgacttcttccggggttgcatagcgctgaatcaaagatgtcggttcattcactttaaaataatcccggacgaagctgtccgtgtcttctccggcagcctttgcggctccttccatgtaagaagcgacgccttcggtccatgtcggtcccggcagcacggagttgaccgtgacattcgtgcctttcgtcatttccgccattccccgggacaagctgattaacgccgttttcgtcattgaatacggaatcatttgcgcaagcggtttgactccggcttcactggagatgttcaaaatccgtccgctgtttctttcaagcatttgcggcagaaaacgccggcacaggcgcacggcgctcataacattcacttcaaaataccgagtccattcgtcatcagacacctcagcgaagtcctttacttcaaaaaaaccgagattattgacgagaatatcgacttccccgattccgccggcgcgcttgatcaggtcatccgcctcatcctgacgcgataaatccgcagcgatgccgtgaaccgttccgtaagcggaaagctcctcaaccgtccgttccacggtttctttttttcttccgtttacaatcacctcggcgccttcggctaaaaagctttttgccgcggcttttccgatccctgaagttgatcctgtaatcaatacgagctttcgttcaagctgtaattccatgataatcctccttattacaccattgtgtaacagtatacatgatgaattttagtgtgtacgaacaatttgctttcatgcaaaaaggccggatatacaagccttaaagacttatagtataattactgcgaaaaaaggatacgaatgtcaaagagacaatcgtttaccataatcagggggagttaaaagaatgaagaagatcactgccgtctgggcggcgctcttggtcaccgcctttgtgatcgccggctgttccggcgcacaggaagaaggaagcgcggccaaacaaaaagccgtctcaaccgaagcattcccggtaaccattaaggatgccgcgaacgaaaaagtaaccataaagcaggcaccggaaaaaatcgtttccctcatgccgagcaatacggaaattacatacgcgctcggactgggagataaggtcgcaggcgtcacgacaaatgatacatatccgaaagaagccgtaaaaaaaccgaaagtcggagatatgaatgtgaacgctgaaaaagtcatcgcgctgaagccggatctcgtgcttgcccacgcgtcctctatgtccgcttccgccgatgcgatgaagcagctgaaagatgcgggcatcaccgtcttaacggtcaatgatgcgcaatcgttccaagatgtgtacaaatcaatcagcatgatcggaaaagcggccggcaaagaaaagcaggcggatcagctgatccaatcgatgaaatccgacctttccggcatagaaaagaaagcggcggccatttctgaaaaagacgaaaagaaagtattcgtcgaagtgtctcctgacggctacacgacggggaaagacacgtttatgaacgaaatgcttgaagatatacatgcgaaaaacgccgccggcagccagaccggctgggtgcagctgacggatgaagcgattgtcaaaatgaatccggacgttatcatcacgacagacggcgtaaaggccgctgaagtggaaaaacgcgccggctggggtgccgtcaatgcggtcaaacaccacaatgtctattctgttgatcctgaccttgtcacacgctcaggcccgcgccttgtcaaaggggtcgagaagcttgcagaaagcgtttatcctgaaacgtttaaaaagtaaccgcccgctggcctacacggtcagcctgctgtttttagccgtttgtacggcactcggcatttcaatcggcagtctgcatattcctttatccgacgttttttggatcgggatcggccggacatcctctgttgatcccatgaatgtaaatattatgatcaatatccgcctgccgagagtcgttctggccgctcttgtcggagccgcgctatccattgcgggggcggcgtttcagggacttctgaaaaatccgctcgccgacccttatacactcggggtatcttcgggagcctcggcgggagccgttatcaccttgtttttcggcattcagattcccgtcatcggccggttcacacttccggttgtcagcatcgccgctgccattgcggttatggcggcggttctgtttttcagccgcctcgttcatgcgtcgatgtcggtttcgacgctcattttgacaggcatcattatgaattcttttctcggggctctcatttcgcttgtgattgctttaacgggaaatgatctgctcccgattgtccgctggctgttgggaagcgtgtcaatgaggggctggggctatgtcgcgctgtttctgcctttttttctggccgggacggcgcttctgcttatcaatggcagagaattaaacattatgacttatggagaagaaaaggcaaagctgttaggcgtcagtacgggaaaaagaaaactgctgatgatcgccgccggatctctgttgacgggaggagcggttgccgtctcggggacgatcgggtttgtcggccttgtcattccccacgtgacacggcttttgtgggggacggatcatcgccatttactgccgctgtcagcattgacgggcgccgggtttctcattttggcggatttgttttcccgcaccgttattgagcctgtcgaattgccgatcggcattatgacggctttggcgggagcgcctgtgtttgccttgattctgcttcgccagcatcatggagggaaacgcttatgatcagggtgagcagcctgtccggcgggtacggaggccggatgattgtagaagatgtcagttttaccgccggaaaaggtgaatttgtcggcatactcggtccgaacggctcgggaaaaacaacgctgatgaaattgctgacgggaatgctctctccgtcaaagggcgaggtgctcgtcgcaggcaggcccgcgggcagatacaagccgcgggagcttgcgaaaattatggccgttttgccgcagcatacggagcaagcttttacatttaccgttaaggaaacggtgtccttcggcagatacccgtatcaaaaaggactcttcagacagatggatcaacatgacgaagacattgtccgggaagcaatggaaatgacgggcatcgaccgatatgcacagcaatccgtccgcaatctgagcggaggggagcggcagcgcgtctatctggcgcaggcgctggctcagcagcctgaggtgctgtgtctggatgagccgacgacctttcttgatctcaaatatcaaaaagacctgcttgatacggtgaagcggctgacgagagaaagaggcctgacggtcatcagtatttttcacgacctcaacgtcgcaagccaatattgtgatcagctcctgatgatgaaagacggacgcgcttttccgaagcagccaccggatcaggctttgaaaaaagagacgattgaagacatttacggcattaccgtcagcgctgttgcccggcaatcgtcgccgaaaccgctgatcgctttcatgccggaagcgcgggaggaaagagagcccgccggcgttccgttcgcctctctgataaacaaaagcggaaataccgtaacgcttcatacagaacggccgtttagaatgctgtcaaccgcatctgacggcccgggcttttcgtggagccgccggctttccggctcggcggcagctggtttgatctgccgtacgtttgattcggttacgatagccgtgactgcgcagtataccgtttgggtgctgatcagcggacgtttatcggaacagggatttgttcggctgttaacggcagcggctgaagcgagaatgcaggctctttccggcagactggcaaaaggcgacattgccatttgtgccttgcagacaggagaggcaatggacgtccctcacgcggaaagagccgtcagaagaggaaccgcggtatgtgtaaaagcggcggaagaaggaggaatacaacaatgaagctttatacgaaaaccggcgataaaggacagacaagcctgatcggcggcagaacggataaagacagtctgcgggttgaaagctacgggacgatcgatgagctgaacagctttatcgggcttgcgcttgcggagctagataattgtgagaattgcggtgatgtgaaagccgaactccgaaacattcagcatgagctgtttgactgcggcggcgacttggcgacggtcactgaacatagaagctatacattaagagagacatctatttccgcattggaagactgcatagaccgttacacggctgaagcgcccccgcttgagaaatttattcttccgggcgggcataaggcggctgctcagcttcatatcgcgcggaccgtcacaagacgggctgagcgtctcgtcgtgaaactgggcaaaacagaagagataaacgatacggtgatgcgttacttgaaccgcctgtctgattattttttcgcggcggcaagagcagttaacgcaagacagggcgttcaggatatagagtatgaaagaagcgccgcggtattccgtgatgatgaataacgttttgttcagccggcagcagcaagccggctgtttttttatagagatatccatcaattgaacctttattgacagaaggaaaatgtatcttatgcattattgactgaaaaattaaaaaatgagatattataagaaacattgtaaaataatgggggatttgatagatggatacatataataagagcgagagcatctggaataaaaatttcacccttctgtttatctcgaggcttgttaaattgtcaggcgacggttttgcctttaattccattctgtggtttttgatttttgacggggaaggcgcgatcggcacgtccctgctcattgcggtcacgttccttccggaggcgatgctggcgccgattaccgggccttttatgaagcagcatacgctgaaattctggatgtatttctccgatctcacgcgcgcggcggtcgtgttgatcattccggtctgttactttaacggtttttctcctttatggtttgtcatgcttctcatgattttgcattcagccacgggagccgcttataatcctgcatctatctcattaatccccaatattgtcggagaaaacagcctgcagaaagcgaatgcggtcatccagtcatcaggccagatcgtcagacttgccgccattacgctgagcggggtgttcttaacatttatcagtcccgcttattctttgtttatcgctcttatattctatcttctatcaggttttctcgtactctttatgtcataccaagtccagcatgccaaagaggataccgtcgccgtcagacagcgcgggacgtatgtcggaaggctcaaacggggtttcgttcttgtcaggaaacaccagattttatacccgctcgccatctattgtatcttcatgaattttgcggccgctccgtgggaggcgctctctgccgtttatgtcgccgaagatttaaacatgccgccgatcatctactcgcttttgaaagcgacaggcacgggcggagcctttttaatgggttttattttggctaaggtgaaggtgaacaaatacggtctcctgtttgtgtcagcgggaatcatagaaggggcggcatttttcatcaccggcctcaacacttttctgccgctcgtcttcctcgccgcgtttgcgttcggatctgccgtcagcgcgattaatgtgccggaatatacgattattcagacgtctgtggaccatgatgatcagccgcaagtctatgccgtcatccatatgatctcaaacatatccattccgctcggcgcggttctttgcggatacgcggctaacgccttcggtcccggaaaagtcattgccgccggcggtctcgttgaagtcctgtccggtctcggaatattgctctttacgaagctggccaaagctgaacgctcagatctcatcagggaaaaagaagcgagcatcagaatatagatttttcgtgaaacgccctgcgccgtccggtgcagcggcgtttttttatgcgaaggtccggggggttatacgactccggtctgatatgaaaatcaatctctgactcgttttgccggccgcgggatttgtttatagtaaagacaaggaaaacgaaaggaggatctgcatgaatataaatgtaaaaacggcaggcggctttctgctgattgtgttcggactttctgtctttttcggaggaggccatttcgcatttatcatcccgctggcgatcggaggcctgatgctttactggggaatcaaacgtttttcaaaaggccgggcggtatcgggtatcatcgcgggcttcatcggagctatgattctcgtcggttctcttccatttatcgttgccatcggactggctggcgccatggtgtatttcgggtggaagatgatgaagcagggcggctcagacaccgcttcccgccagtatgaaccggaagcggcatcaccgggctatcaatccggatttgactctgaatgggaagaatttctgaagaaaaaataaggaggaagacaaaatggtcttaaaaagaataagaaatatgttcgtcgcatctgttaacgaagggcttgataaattagaaaatccgaaagtcatgctgaatcaatatgtgcgtgatatggaaagtgacattgctaaggcgaaacaaacgattgtcaaacagcacacgatcgtccatcagtttaagaaaaaacaggaagacgcttccgaaacggcggcaaaacggaaaaaccaggctcagcttgcttttgacgccggggaagaggagcttgcgaaaaaggcgctgactgaaatgaaataccttgagggaaaagcggccgaacatgaaaaagcgtatgagcaggcgaaaacacagctggcagagctgaaagagcagctggaaactttagaaacgcgcctccgcgacgtaaaggataaaaaacaggcgctcatcgcccgcgccaacgcggcaaaagcgaaggaacatatgaacgcttctttcgacaaaattgacagtgaaagcgcctacagagagtttcttcgaatggaaagccgcattgaagaaatggaagtccgcgtcaaatacggcacttcagctgaggcgaacacagaatacagccgctcccaatattcagacgaggtggaagctgagattgaaaaaatgcgctcgctttctctggagaaaacagagcatcaaaaagcggctcatgaataatgtgcacaagggaagatcggcgcttttacgcctcttccctatacgcacgtatcaattctccggcttttcctttataataaaatgaatgaaaaaggatggaacgtaatgaagcgtaagatggccaaaggactgatggcggcgtccgttctgatctgctgtctgtttttggtgaaagaagtgtttgccgggcgtttttttccgctgtacgaaacagaagcggaatcggcaagcataccgccgcgtgccgtcaacagcctgtcggtttcatcggaacagacggatgtaaaaatcatcgcggaagcgcggaatgatatcgcggcaaacatggcgggaccggcggggaaaatgtttgtccaaagcaggggaaaaaccctcaatctcaaagcgaaggagaaagggttccaatttctgaatctctttcagcgtcctctgctgattgtccgcattccgtatgattatcatcgggacattaccgtccatacgtcaagcggcaccattgccgttgacggaaacaaggggctgtctcttgcgcacctcggcgtccgttctgtaagcgggaatatgtcgctgaagcacgtgaagacggatgtgtttgaagcgaaagggctgtcgggcaacctcacagcatcaggccttgcggcgaaaacgggggatatccgcttatcctccggacatgtcgggcttcaacatgcggcgggcgcccttgacgtgcgggtcgcttccggcagtgtcgacgcctcgcttgagatggcggatgctcccgtatccgtcaggcttgcgagcggcagcgcagcgatcagcctgccgaaagacggaagttttacggtgaacgccgagacggcaagcggaaggattcagccgtcttattcctttgagaaaacgagtaaggacggcggggcattcaccggtatgaagggcagcggcgccaggccgattgatataaaagtgacgagcggcaatattgcactgcaatagtcaaggaaaggaggggcaggcagctgatggcaaaaaaacagattctcggacttatcatcgccttattaggcgtcagcatgtttttgcgtattatcggcatcggcgacttcttgttttggccgctcttttttctgatcacaggctatatttttaataaatattcccgcggctggctcggctccgtcctgtatatcttcgccgcttttttatttttgaggaacctgttcagcgccacctttaacctgttcggctatgccttcgccgcctttctcatatacgcgggctacaggctcctgaaaggaaagcgcgtgtatgaacataaagagaagaaaatcaatcttgaaaaagaagagcagccaaagccttccgcccagacggaaagcagacagccggacctccgcagcttttttatcggcgagctccggatgatgaaggacccgtttgagctgaatgatttaaatgtttccggattcatcggcgatgtgaaaattgatttgtcaaaagcgatgattcccgaaggagaaagcacgatgaccatcagcggtgtcatcggcaatgtcgatgtgtacgtcccgccggatatcgaagtgtccgtcagttcatcggcttttatcggcgatatgaacctgctcggctctaagaaaagcggcatgagcccgaatctttataaagtatcgtctgagtacggcgactcgccgcggcggattaaaatttcaatttctttattcatcggcgatgtggatgtgaagtatttatgaggaaaaaattactcgccaatattcagtggcgcgccatgcggatgactgcggggctcagtctgctcctttgtgcggtgtttattacgctgatgctgctgtattacgggcttgacccgatgctgctgttttcttccggctggttcggtattccgtttgtggtcatcctgcttctggcgtctctttcggccggattgatttccggttatgtatacggcggccgcctgaaaacaagaatggatacactgattgaagcggttttgaaatttgaaaacggcaatttcgcttatcgggtgccgccgctcggcgatgatgaaatcggcctggcggcagatcagcttaacgaaatggccaagcgggtcgagctccaggtcacatcgctgcaaaaactctccaacgagcgggcggaatggcaggatcaaatgaaaaaatcggtcatcactgaagaacgccagcggctggcgcgcgatctgcacgatgccgtcagccagcagctctttgccatttctatgatgacatccgccgtcttagagcaggtgaaagatgcggatgacaaaatcgtcaaacggattcgcatggttgaacatatggcgggggaagcgcaaaacgagatgagagcgctgctattgcatctgcggcccgtcactttagaaggaaaaggcttaaaagaagggctgattgagctgttaaaagagttcaaagcgaagcagccgctggatattgagtgggacatcagcgatacgggtgtgtcaaaaggtgttgaagaccatctgttccgcatcgtgcaggaggcgctttccaacgttttcagacattcaaaggcgaccaaggtcaccgtcaggctcggcgcgaaacatcaaaagctgcagcttaaagtcattgataacggggagggttttacgatggatcaagtgaaagcatcctcatacggcctgcattccatcaaggaaagagcgagtgaaatcggcggcatagcggaaattatctccgtgaagggaaaaggcacgcagatcgacgtgaaagtcccgatttatcagaaaacaaaaggagagaacgacagtgattcgagtgttactgattgatgatcatgagatggtcaggatgggtctggccgcatttttagaagcacagccggacattgaagtcgccggtgaagcatcagacgggcagcagggcgtcgatctggccgcagagcttttgccggatgtgattttaatggaccttgtcatggacggcatggacggcatcgaagcgacaaaacagatctgcgcgaaactcaatgacccgaaaatcatcgtgctgacgagctttattgatgacgacaaagtgtatccggtgatcgaagcgggagcgctcagctatttgctgaaaacgtccaaggcggcagaaatagcagaagccatcagagcggctgccaagggtgaaccgaagcttgagtcgaaagtggcgggaaaagtgctgtcaaggctgcgccattcagagaatcagcttccgcatgaaacgctgacgaaaagagaactggaaatcctctgtctcgtcgcggaaggcaagacgaataaagagattggtgaagagttgttcattacgattaaaacggtgaaaacccacattacgaatatattgtcaaagcttgatgtcagtgaccgcacgcaggcagccgtatatgcccaccgcaatcatctcgtgacataaaaaaaggagagcggcgccggcacactctcccgagggacggggtcattgggacattccctttgttccgaaatccctgatggcgactttgactttgtattcaatatccgattcactgaagtgatgatcccagtcagaggatatctttttccatttatcaggataatgaatccggacttgatcgcctaacccggtaatatccactttcaactcatgctgcatgtaatcaatgaatgccataacatctgaatgaatgctgcgttttaccgcgtttttgatttcatttatataggactccttgaaagaatcttctttcggattccaatcctcagacagacggccttcaacaaaccgggtgacgataaacttgaattttccgtttttatattgtgtttttacattatatttgctggaaaatacctcgaaagataaataataattgtcatgctttgcaaacgtgacgcctccctttaccgtgcctgtgaacaggttcatattctggacttgtaaaggcgttaaatttgcataccagaatttatttttaataatggtagcgccccagatttccagtctgctgcccactttgcgcacttgaggaagggcaaaggtttcgcccttggcgattttctctgatatttcccccaatgtcacgggctccatcatccggatggtgaccgaattattctccgttaagtcatagatcgtatttgacgcaggttctccctggtcactgatattgaaaatatctttcgttttatccggcaccgtcatcacattgcagcttcttctcgtaccgttgtctctgataaattggttcatcaatgcgtcaagcggaatgtcatcctttaacagcgcttcggaaaacagcatgatacgcaagtgctgggagaaggcggggtgattttttaacgatgccgttcttaatgcttgatggacggtttcccctggagtggaagtcacctttgtcgtgtcacctgacgacgactgctgggcacttgctttttgcggaaccagaatctgctgtgtcacttccacattttcttccgcgggtttatctagcccgactccgataacgaggctcaagtcttctaaattgcggctgtcccagcacccggccaaaagcaatgtgcaaaatatgattacgatgtatttcttcattgtgcttttttcaccttccttttcacagcgacgactgcaaacatcagtaaaggcagcaaaaagaaaaccaagaagatatagccgagaatatcactgaacagcatcagcttgtttccgtcttttggcaacaatgatccgaagaatgtcgcgatgcctacgaagatgatgccttttttctgtttcagcccgaaaattttatgaagagctgatgtcgcgaaatatccgtatgatacataggtggcgaaaaactggatgatccagacaacaagcaaaaaggactcgaacctttcaataaaaagccctttgatttcaaatgattgaaagagcgcgatcgttggccagatcattgttttgacatcctgggtggttaaggcgccgacgacgagaacgtaggtaatgatgtataaaataatcgggatgccaaagcctatggccgacatgcggaatgtgtgctttttatttttgaggtactcggggagaaacagcataatctcaattcccaagaaggaaacagaaacgacggtcaaggaagccataacgggagaaaatccctgcccgagcaccggccgcaggttgtccagatcaaatattttaaagctgaaagaaaacaccaccagcaaaataatgatcgtaatcgttaaatagaaaggaaagagcctgccgatatcgctcatgccgccgataattaaataaacggaacaggcgataaagataaacagtgtgaccggcacgggcgttctttccaataaaaagaacttgaccatttccgccatcgcccgggcttcgaagctggcgactcctataaaatagagacagatcatcagattgacgatatttcccgcccatttgccgagtccttcattcatataatcaaataatgatccgtactgatgctttttcataatgagcgtattgagataaatcaaaaagataaagatgacgccttccagacataacgcgatccagccgtccggcgaatttgccctggatgacagcgcccgcggcatggtgaggagccccgcgccgagcatcgtgtttgcaatcaatgctgtcccttgatagcttgtaagcttattgtgagttgttttctggctcatttacgtttttcgcctcttttggttgatttttaatagggagacggagaatagagtcgtttgcgttttttaagctgaaaaatccattcggcgagaaatacggagaaccgaagcttcgctgtctcgataaatgagtgtagatcgccagcataaataaaatcatgccgtacagcccgaaagctgccgcggtaaacatcgaaataaaacggagcacacggaacgacagacccatcccgtactgcggcaccgtaaatgaagcgagcgcgacaatgctgaccacgatgaccatgatggagctgacaatattcgcttcaacggccgcctggccgatgacgactccgcccaccaatccgatcgtctggccgagcgggctgggaagcctcaagcccgcttccctcagcagctcgattgtaatttccattaccatcgcttcaatgataggcgggaaggggacgttttctctgttcgccgcgatggtgactgcaagcgacgtcggcagcagcccttggtgaaacgaaacgagggcgatataaatggacgaaaaaaacagcgtgataaaaatagacgtaaacctgagcgcccggatgagcgaggcggaaatccaccgttcataataatcatcgggagactgcattaaaattcctaaagaagccggaaccaccagcgcaaacggcgagttgtcgacaaggatggcgacgcggccgttgaacaaggcggaagagactttatcaggccgttccgtattttgtatttgcggaaagggcgaatacttattatcctcaataagctcctcaagcgttccggaatcctggatgtcatccatcttcactttgctgaggcgctttacaacatcgctgacgacagacgggtccgccttatcatctatgtacatgaccgtggcgtattttaacttattttctccgatcggaacctttttcgttttcagcttcggatggttcgtgcgctgcctgatcatggcgatgtttgtatcagaatcttctatgaaggcgattttcggacctcttacgaccttttcggatgtgggttcatttacgcttcttttttctctttttcccgtggacaaaatgtatacgctgtcaagtccgttaataaacacggcgcattttccccgcagaatggagatgacggcttccttcgacgtaaagacgggacgggcgttgatcttatcaagacgtttcgccaccgtatccagcgtcagagtgtcttcctcctgaagcagcgtttcaatcgcctcttttattttgtcttcgtcgttcatttcactcagatacatataataaaaaacaagcccgttcggaagcatctttttattttgaaccaggtcatcattctgctctacgtggggaagcaccagtgccagattaacgtgtatgtattccttgaactccgattgcgtcatcgacagtcacccgccttccaatccttaattgaggttatcttttcctgttaaaaaaatgatatactatgataaagtatttaatggtacaagtttttttatgaaagcggaggagagatgtggcacaagtcagactggcaggaaatgccgaagaaattgaacagctcatcaaatcatttgaagcgcattacgaagtggcttacacgtcgaaagaataccgtaaaacaaatccgaagtataaatactctaaggattcgcgcgtctatcttgagctgaaattaaaaacggccaaggccgaaaaataaaaagggtttcatctgttactggcgaataatactcagggtgaagcaactgttatggagggatacataaatggactacagaattgaaaaagacaccatgggagaagttaaagttccggcagataaattttggggcgctcagacacagcgcagcaaagagaacttcaaaatcggttcagaaaaaatgcctcagcgtgttgtgaaggcgtttgcaatattgaaaagaagcacagcgatcgccaacgaacgcctcggcaacttagagtctgaaaaagcccaggcgattgccgctgtatgtgacgatgttttaaacggcaaatacgacgataactttccgctcgttgtctggcagacgggaagcggcacgcaaagcaacatgaacatgaatgaagtggtggccaaccgcgcgactgctttattgaaagaaaaaaattccgagctgaagattcatccgaatgatgacgttaaccgcagccaaagctcaaacgatacattcccgacggcgatgcacgttgcggcggttcttgccgtatatgagcagctcgttccggcgcttgatcagctgcgcgcgacgcttgatgaaaaagcgaaagcttatcaggatattgtgaaaatcggacgcacgcatttgcaggacgccactccgctgacgctcggacaggaaatcagcggctgggtatacatgcttgaccgttcgaaagaaatgattcttgagtcaacggaaaaaatccgcgcgcttgccatcggaggcacggcagtcggcacgggaatcaacgcccatccgcagttcggtgaattcgtcgcggaagaaatcacaaaagtaacggggcagacattcaagagttcgcctaacaaattccatgcgctcacaagccatgatgaaatcacttacgttcacggcgcgttaaaagcattggctgccgacctgatgaagattgccaacgatgtcagatggctggccagcggcccgcgctgcggaatcggcgaaatcgtcattcctgaaaatgagccgggaagctctatcatgccgggcaaagtcaacccgacgcaaagtgaggcgctgacaatgatcgccgcgcaagtgatgggaaatgacgcgacaatcgggtttgcggccagccaaggaaacttcgagctgaatgtcttcaaaccggttattatttataacttcctgcagaccgtgcagctgctcagtgacggaatgaattccttccatgacaaatgcgctgtcggtattgagccgaaccaagagacgattcaggaaaatctctctaactcattaatgcttgttacggcgcttaacccgcacatcggttatgaaaacgccgcgaaaatcgccaagcttgcccacaaagaaggcctgacactgaaagaagcggcattacagctgaaccttctgacagaagaacaatttaatgaaatggtgcgtccggaagatatggtgcacccgaaagcataaaagaaagaacggctgcagtcattgcggccgttcttctaaataaactgctgtttcagtaaaaatctgagctgttctgcatcttcagccagcaggtcggattccttcaaattcaaaatcattcctttgatgattgccggtttcggcgactttttcttcatttccgcttccagaatatccaagctctcggtgaattcagatgcttccgccttgtccatcgtgccgatgcgcgtgcggagggtctgcaagatcgattggcttaaaggatcgggctgcccgttatgaaggggcccaaacagtgagcttgcctcatcaagagaaataaatgcttcatcatgtctgcccgccattccgtttacgatgtcatcaattctgtgaatcacggtatttgccaaaagcgaaggctgtacggaccggccggtcagaatgagatattcaagatacatctgactgattccttctattaaaaaacaaagctcggctgtgtatggttcagctttttctccgtaaacagcaagaagactgtcgatatgaaactgcaggatcgaccggcggattctctttccgcactgcgccgcttcttcggtataaggaagtgaaccgtctttcatctgcatggtaataaaatcctgatgggcgagaatcgattcgtaaaacaccgcaagctgtttttgataagcggctctcggactgtcaccctccgtttggatcgtcgtgattcgggtaaacgttttatcatagtagtaattcagcatggataggagcagtgcttctttggaaggaaagtaaagataaaaagcgccttttgagattttgcattcatcggcgatttcctgaaccgatgtagatttgtacccttttcgggcaaacagtttgattgctgcttcaatgatcagcttttctttttccttcaatggttccaccctttcggagccaggaggctggcttgtgcttctcatgtatgactatatggtcatattgatattccgtaaatttaacctgattgtaacttgtttttttgttttgttttatttatattataaagtgagctgaccgaatggtcaaagttctggcgaaagggtgaatctgaaaatgaaagaattagatgaaatgatcagccgcttgcgaaacagaggaattaaagtcgaaaaggtgaaatatccgaaaaagacaatttgtgaaaagaaatgggttcatcaatgccaaaaaccgctgaaagcaaactacagagattttaacggctattccttcacataaaaaaagactgcaatgaaacactacagtctactttggtatgataattcggtagattacacccgattggtcattttcaattgaaattgatgctttatgcagggttaaaatccgttttacgatgctgagtcctatgccgaactcgcctttcttccctttattaaaaggctcgtacaagctggatagcatctcatcctcaatcggaggcccgtcatttttaaccgtcatgacaatctgctgctgattttggctgatccgaatgtgaatcgccgtttctgcatagcggatttgattttcaagaatgttttcaagaagtttgctccattgttccggatcaccgggcatcattaatgcatcttctgtatcaacgctccacaataattccttccgggcccatttgagccgttcaatgacttcttccgtgaccttcacaatgtcaaatgtctcatggtgcacccgctgcttcattaaataatcaagcttcgttaaatataataaatccttaattttcttctcaagtttttctgcttcgccttcaatgacatcaattgtggtttccagatcccccttaggaaaaatcccgtcctttattgattgagtatagccccttatcaccatgacaggcgtttttaaatcatgagagatattttgcaggagcgttctttccgtttcatccttttgcaccagcttgctccgcatgtcttcaatggtatggcctaattttccgatttcgtcttttctgtcgacgatgaccggatcatcccagtcctgttcggaaatccgtttgacatgcttctctaaggaaacgagcgggcgtgagagatatttggcaagccaaatcgccggaatccagcttaacaaaatcacgccggcaatgataaaaagcagctgcttgaacagggtgaatgccagatcatcacgataagaatcaagggcgtaagacagcatcatcgcatcctggccgttaatggtgaggccttttttaatgacgaaaaaaactttttcaccgctgatgtccgcgctgtatcgtttcgtgacgctgtgctggcggcccgcgagcttgtacaccttatggataaaggaagaagaaaaatagttcaagtctttgtcactggccgattcctcccgctccggcagaagaacgtgctgaacggatcggaaagtcgtcggagcggtcgcatcctcgctgtaatatccccgctcgatcgatccgggcagccggtactccgtcagtacatgctgttcattttcaatggtcgtatacgtttcatccgtgaaaaaattacgcagcgtatttgagaacagcacgagaagcagaatcgagatggctaagaggatgcctgagatgaccacccatatttgaaaagcaagcggcttatttttcatgacgtcatcatcctgtagccgaatccgtaaatggtctcaacctttaacccgggcattttttttctcagcctccgcacaaggtcatcgaccacccggtcagtgccgaaataatcatggccccatattttcagcaggatatcttctctggaaaaggggtgtcctttatggtgaagaaataaaagcagcagatcaaattccttagacgtcaaattgaccaggctgccggtttcatcataaacctcccgggcatcttcgatcacattgtaggaagaaacggtgatgccggttttctttgcggcgggctgttctttatacacgagctcgagcagtttctggacccgtataataagctctctcggcaaaaaaggcttggcgatataatcattgcttccaagctctaacccgaggactctgtcaatatcggcatcccgcgcggaaatgaaaatgaccggcacatcgggatctttttcttttatttcttttatcaatgtatagccgtccgtatccggaagcatgatgtcaagaatccacaagtggggagacggctgcatctgctttctggcatcttcgccttttgtgaaagatgtaatgttccagccttcattctctaaatattttgtgagcagttcattcaggttatcctcatcttcaactagataaatggtgtatgacaaggcatttcacatcctttcaacgtcattatactagttttaacatactcaagccgcattttcataatttcacatattcttttcatttttatcccacaatgtttgtttatgatgtgtataagggaagaaaggaagaaaaaaagcggggaagataacatgttcaaacacattttgttttggagctttgcttttctccttattattgggacaatagaacttgtacatgcgatgaatatgtaatcgatagaatgaaaacatgctgaaggagtgtgcgtgaatatgaacgatcatcgagatgacggcagaagccgcgatcagtcagatctttcacatacggaacaaaacagaaatgaacagcagcagatcagccatcaggagcccgagctgcttgaagggaccgtctcgaaagaaccggaaaacgagacggctgccggtacggaatttgaaaaaacggctgccgtgaaaaaagaaaaaaaacggagagccgcttggctgagcccgattttaggcggcattatcggcggaggcctcgtgcttggcattgtgccgaacctgccgggtgagcagcataagacagaagccgtttctgatacgaaacaagttcagtcttcgaattttacgtcaacgcctttgaaaaatacctcaagcgtagcggatatggtggaagaattggagcccgcgattgtcggagtgtccaactaccaagcttcgcaaagcagccagttcggacttgacggcggttcaagctctgaaacggaaagcggcacggggtcaggcgtcatcttcaaaaaagacggcgaaaaagcgtacatcattacaaacaatcatgtcgtagaaggggcgaacaaactgtcggtcactctttacaatgggaaaaccgaaacggcaaagcttgtcggaaaggatgccatcagtgacttggctgtattggaaatcagctcgtccaatgtcaaaaaagcggccagcttcggggattcctccaagctccgcattgccgataaagtgattgccatcggcaacccgctcggccagcagttttccggcaccgtcacacaaggtgtcatcagcgggctgaacagaacggtggacgccgatacatcccaaggcacggtggaaatgaacgtgattcagacggatgcggcgattaaccccggaaacagcggcggcccgttaatcaactcaagcggccaggtcatcgggatcaacagcatgaaagtcagtgaaaacggcgtggagtcgctcggctttgccattccgagcaatgatgtagaaccgatagtcgaccagctgcttgcaaaaggaaaagtcgagcgcccgtttttaggtgtgcagatgattgacatggcgcaagttccggaaacctatcaggaaaacacgctcggactgttcggcgaccagctgtctaagggtgtttacgtaaaagaagtgcaatccggctcaccggctgcgaaagcgggcatcaaatcaaatgacgtcattgtacaactgaacggcaaagatgtcgacagcagcgccgatatcagacagatcttatataaccagctgaaaatcggcgataaaacgactgttcaagtgctcagaagcggaagcaaaaagacgctgaacgtcacattaacgaaacaaactgaaagcgcaagctgagcgcataaaaaaagctgaaccttcaactgaggttcagcttttttcgtcattctcccaagtaggctgacagcatccacacatgcttgtccgcttcttcaactaatccgacaaacaggtcggcagttgacgggtcattttgttcctctgcgatgccgatgacaaattttgattcgcggctgatttgtttatagtcttgaaccagtgatttcaccatttcagaagccgttttttcctgaccttcatccgtaatggaagcttgttcaaggtaagtgtgcaaagtcgccgcaggctgtccgccgatggccagaagacgctctgcgatggcgtccgccgtttccgctgcttcgttatacagttcttcaaatttttcatgaagcgtaaagaagtgagggccttttacataccaatggaagcggtgcagtttagagtaaaggataaaccagtttgataattgtgtgttcattgatttctcaacaagagtttcagtttttttcgcgttttgtgtattcatattcatcgtcctccctgtgatctgttaatttaattatatcacgtatcaaataaaaatcaatactaaattataattattataatttagtttaagtgaacagctttttctttataatcgattcccaagcggaccacggaaagagtgagcggaaagccaatgtcagcttaacgcccctgccgatcggataccgcagtttcttcagccgtttcctttgtgccaattgataaatcagctccgctacgtcatcaggatcgccgcttttggatgcgttggctttgaagtaagcttcaaggggctgataaaagcgataataaggcgagtctttgccgggcgccgtaatatggctggagagagacgtctcccaaatagacgttttataggagcccggttctattaaagcggcatcaattcctaaaggcagaagctcgaggcgcagacactctgtaaacccttcaaccgcgaacttggaagagacatacggagatagagccgggaaaccggtcagtccgctgatactgctgatattgaagattttcgccccgccatgtttccgcatataaggcagcacggtttttgtgacgtgaatcagaccgaatacatttgtttcatactgctgtctgtaatgttccatcagcacatcttcaataaaccctccgtacgcagtgccggcgttattgacaagcagctcaatcggtccgaaaccgctgatggtgttcccgaagtcagacaccgactgctcatttgtcacatctaaagaaacgaccgtaatatatgcggatgcacccgcttgagcggcggcctctttcagtattacagctttctccggctgtctggctgttgcgatgacgtgataagaccgggcgagcttcagcgctgtcagcatcccgaatccgctcgtcgcaccggttacaatggcaacttttctgttcatcttataatcctccccgtttgtcgtttgttcttatctcatagtgtataacatctcgcggaaagaaggagaaatcgttcggaaatatgtcagaattgttttataatggagtcagcttcggatagaaaggggtaaagaaaagatggcattagagggattgaaggaaacatgggatttaaactccatttttgagggcgggagccggtcggaagagtttcagcaatacatacaagagctcaaaaagcatctaagcgcttttcaacatgcggttgaagcatttacagttccgacgcacgcggatgaaagccgggagctgatcaatctgattgataggtttgaacggtcagcgatcatgatcaggcaggcgggagcgttcgtcggctgtcttcaggctcagaacactcatgatcagaaagcgaatgaatggagagcgcggatcaatcagctgagcagtgattttaaatccgctctggtcacccttgacgatacacttgcccggattgacgagcgggtctgggaggagctcctgcaaaaaccggaacttcaggatctcacatatgttttaaatgagagaagagaccgggtcagagagaagctcagcgcttcagaagaaaggctgattgaaggcctggccgttgacggctatcacgcatggggcgacctgtataatgcggctgtcggcagaatgaagattccgtttgaggataaagagctgtcggtcggccaagcggaaaatatgatggcgcacccggatcgccgcatcagacgtcaagtgttcaaagagcttaatgaagcctggaaaggagaagaggagcttttcagcagcacgctgaaccatctggccggcttccgcacggaaatctataaagcgcggggctggaaaagcgctttggaagagccgcttgcgatcaatcggatgaaaaaagaaacgctggatgtcatgtggcaggtcattaccgatcataaaaagccttttgccgaatacctgaatcgaaaggcgtctcttttagggcttgagcggctgaactggtatgatgtgggcgcgccgatcggcgaggcttcgaaagaatacacatatgatgaagcggctaatctgatcgtcagccaattttcgacgtttggcaaaaagctgtccgcattcacggaaaaagcgttccgcgatcggtggatagaagcggaagaccgcagcggcaaacgggtcggcggtttctgcaccagctttcccgacagcggagaatcccggatttttatgacgttttccggaagcgcttcgaacgtatcgacgctggcgcatgagctcggtcacgcgtttcatcaggaggccatgctccaagtgcggcagctgaacagagcctacgctatgaatgtggctgaaacagcctcgacctttgcggaaatgatcgtcgccgacgccgctttgaaacaagcggagacaaaggatgaaaaggtgttcttgcttgaagataaaattcaaagaagcgtagccatgtttatgaatattcatgcgagatttttatttgaaacgcgtttttatgaagagcgcaagcagggcgtcgttccggctgagaaactgaatgaactgatggaagcggcgcagaaagaagcattttgcgattcattaggggaataccaccctcatttctgggcgtcaaaactgcattttcatattacgggagtgccgttctacaatttcccgtacacgttcggttatttattttcgcttggaatatatgcaagagctcttcgggaaaaagcggattttgaagaaaaatatatcgcgcttttgtgtgacacggcttcgatgaccgttgaggatttggcgatgaagcaccttggagcggatctcacggaacggtcgttttgggaagacgcggtccgccttgccgtacaggatgtgcaggaatttttagagctgactgaatgataatctggagatgaaccggccggagctgttaccgctccggttcttttttgttccgtgaatgacagccgcctcccttggaaatacctaaaaacgatcggaatggaatgggagtgaatcgcatgaaatggatcagaacggcgggcgttttatgtcttacgctgatgctgattgccggctgccgattgaatgaagaaaaacgggaagcggaacaagacagcacacctgtgtcatccgagaagccggttccttacagcagcttttccctgcgcgtcagctacggagccggagagcataaccgctatgaaggtttgtatgaaagaaaaagcggtcatgaaaaggcggacatccgggacaagctctcaggggttcacagagagggcgaggaagcgcttgatgaaatgaagatgatcctcggagaacttgccgtaaacggccggatgcaggaaagcgaggtcgtccgggaggtgctttcggcttttaatttggacagccgctatgaccatttttatctaaaactgaaaaagaacgatggagtaatgacggaaataaaaaaataaccgccgcccgctgcttttttacccaaaactaattgataatgatattcagagtcattaatttctgttacaatataatcatgatctcacgttgaatgtttaggcaatttgtttatatacatagtgttgggaaactcaaaaaaggagcggttagcggtatgagtgcaatttctacagagacgctgagcttagggtacggagagactgttatcattgacgaattggatgtcgcgattccaaaaggcgaaatcactgtattgatcggaagcaacggctgcggaaaatcgacgcttttacgttcattggcccggctgatgaaaccgaggggcggttctgtgcttttagaaggaaaagccatcgctaagcttccgacgaaggaagtggcaagagagctcgctattttgccgcagagtccgtcagctcccgaaggcctgacggtgcatcagcttgtgaagcagggaagatacccttatcaaagctggctgaagcaatggtccaaagaggacgaagacgcagtcacaaaagcgctaaaagcgacgaagcttgaggaaatggccgaccgtcctgtggattccttgtcaggcggacagcgccagcgtgcatggattgcgatgacactcgctcaggatacggatatcattctgcttgacgagccgacgacttatctcgacatgacgcatcaaattgaaattcttgatttgctgtttgaattaaatgaaaaagaaaaacgcacaatcgtcatggtgctgcacgatctcaatctggcatgccgttatgcccattatctggtcgccataaaggataaacagatttacgcagagggccgtcccgaagaagtcatcacttgcgagcttgtacagcaggtctttgcaatgaactgtcaggtaacgcaagatccgctgttcggcacgccgctttgcattccgcacggacgcggcagatgtatcgtgcaggaagcggccctcaccgcccgattgtcataatcatgaaaaagggaaggaaacggtatggaagaaaaactgcagcagcagctggacggcctgcttgagaaatacactgaactattgcttggcgaaacaaacccggatgtaaaggaagaagtcaggcagtggattttgtatacacatatcgcaaaaagcatgccgccgctcgtcaaacattggaatcaatcctacccggacgccaaagagggcatcaaagctgcgatacagcacattaaacagctcaatgaagctcacagaaaaaaacaataaaaagctttcggcatcaaagagaggtgccggaagctttttttgctgaaaaggaatcaataaaggcgccgttcaattcataacgaagaactttaatgtaactaacacacccgtttgtttacttgctgaaccaagaaaaaaggaccgccgcagcaatcccttactctttcctatatatcacatttcctttcggatacgtaataactcttcaaatgcttttatatttgtatcaaaattgggcactgtttgagattcctcggcacatttgacttgtgctacaaccaaatcattaaaaggtgttgaaattccagtaccttctgccattttgggaataactccattaatataatcaatttcagttttgcgttttttctcaagatcctgaagcatacttgctcttaaaagcctggatggttccatggctgccctaaatgtttgaatacgttcaggaatctcattttcactttttaattccaaagattctaaatcaaggccgcccattttcgcaaatgtgacaccattggcgtgtccaaccttaatcgtctcatctgcgatatgaactgcgctgacaatgccgatttcatggtcaagaatatcaccgtattctccgtttaatgctgccgataaaccactgaatgcattattgataagtaattttgaccacttcgttccaactaaattatcggaaatatgtgttccgccgataaggtctaaaaccgatttaatacgctggattctttctgttgtttcaccatttaattctccaatttgaaaagcgtactctttaaattgagtatactcagttgtaagtctggatacgcctggttcaataaacgtagcaccaaattcaacagaacctgcaataacacgttcaccaccaacgatcgaagcaactttctgttcaggtataccgttttgcaaggaacatactacactatcatcctttaaaaaaggcagtaactctttaagaatggagtcattatataattgtttcgtcaggagcaatatgaaatcatacttgcctgacttgttttcaggggtaatggcttttacctttgcctgaaatgccgttgtaccaactactttagcacctatttgatttaaagtatctacatgttctttgtatgaatcaattaattcgacatccattccgccagcagacagatatgctccaactatggttcctaaagaacctgctcctaaaattgcaattctcattgtaaacgtctccttatttttcctctaagtagttataaaccggctgtgctgcatttaaggttaaatccgtaataatatgagatgctgaaacgacttctaatacaggcaaatctgcaagaggcgccagagcatgttcaaataattgaagccgcgccggtccagaccaggcacctttaacttctatattcgttatttgcgtgcgcaccaaatcgcaaacccttaaatcaccattgtaatcagtagcaatcttaaccataaaattaggtcggcaaatttcccttttcgctttttccttgtccatttcgaaatgtttatatcccatagtcgcagctgccacacgaagactgccataatctaatgtgccaacgagagtatcagagtctatatacagcttaggggcgcccaatttctttggatatgcagtaagttcccgtccgcttgcaatagccgggaaattgtctacatacatagagtgtacataatctccttcttcaccattaaagctgacagggatgacttgtcctgcctctgtataggcaccaagtccggaaacatcgggcatccgcatcacttcgaatttcactaaaggttcagtaatttcaagaggttccggcactgccgcacgcaaagctttttcatccgttcggtaaataatatttaaatattcacggttaacaaatttataatttgggataggataagcaggagccgttagcggtgtatttaaattttttgctatatctttcacatcaattttcattgcatgacaccctttccttttctttaactatgctattatcttacatccgcatttacatttaatctaatacataataaggtatatatatatttattgaaataaataagggggatgcagacagatggaattgctgcagctaaaatactttcagacagttgcctatactgagcatatttctaaagcagcagaacaattaaagattgcccagccttctttaagtctcactataaaaagacttgagaatgaactgggaacagctttgtttgagagaaaaggcagaaatattaagctgagttcatcagggaaaattcttttaaaacatgtaaacaggatttttactgagattgaaaatgcacaaacggaaattcaattggaggaacatcaaatgtctgacaccatcagaatatctatttctaatccgagattccttgcaggactgatgagtgaatatatcaaccgctcccctcaatcaaaaattctccaagccatcggagttaaaagcgggatcctaacaagtttaaaaaaaggggacattgatttaggaataacaggtcatcctattcaagatgaagagatagaaagttgtatgctggtaaatgaagatattgttctggctttgccctcaaaccaccgatttacgggtaaaaccgaaatttctttacgtcttgtcgccgatgaaccatttattacccttgctaataatgaagagtatagcggttttacagcctcgctttgtgaaaaagccggtttcaccccaaatattgcatttgaggcggattctcatttactggccgagattataaagctggatcagggggtggcgttgcttcctatttcggtttgcagaacattggggctgaattttataaaagtgactgatcactctgcttcatatccagtcggcttatcttggatgaaacataagctgttatcttcttcggtaagaaattttcgtgactttattttgtcgtactataaagataactatgaaatgtttaaggtttattaaataattttcacccccgatttccaatgaggcggaagactggtcattcggaaacggagaggcccagatgatataaaaaaatcccgcggcatccgcgggatttttctttgttaaacggctttcgccttttcttcttgtttgcctgtctttttgtttgtcagcttaattgatttaacaaacagcgtgaggatcaatccggcagcgataaaggccaggcctgtgaaaaacacgctgtgaagcgaatccatcagtgacgttttcaaaaccggcacgatatgggaagaaaatgcggccgggatctgcttaatcgattcctgactgaacaaggattgaagcagcccttcaggatttttgtcaatcatacctttaaactgggcggcaaaggcacttgcctgtttcgggagtgagtctaagtaaggcaccagtctgtcggttaaaaggcttcctgatctggcattcatgacagcgccgagcaccgtaatgccgaacgttcccccgatcatccggaaaaattggcttgatgaagtcacaacgcccagctcttcttttgaaaacgtttcttgcagagcgagtgtgagaagcggcatgacgagccccattcccagaccgatcactgccatatagcacgtagccgcgagcttgcttgtatccagctgtaaggtcgttaataagaagaagccgacggccatgatcagcatgccgatcatgatttgcggtttaataccgatcttataaaccagctggcctccgataatacttgtgataatcatagataccatcatcggcgtcataatcgtgcctgacgcggtggcgctgactccgataattccctgcataaagaaaggaacgaacgtaacggcgccgaacatgccgatactcatgaaaaacccgatcagattcagtacggtaaacgttctgtttttaaacaggtacatcggcagaatcggttcttttgctttgatttcagcgaaaatgaatccgacaatcccggcaagcgcaagcgcaaagagaccgagaatctgccaagagccccatgcgtaatcttttcctccgaagctgagcgcgagaaggaggctgacgattccgacaatcattgtgaaaatgccggcgatgtcaaagttaatcggcccagtctgttttctgccttgaagtcctcttgcgataaagatcacggctaaaattccgacaggcaggttgatatagaaaacccatttccaatttaatgagtcaacaatccagcccccgatttgcgggccgataacggaagcaaggccgtaaatcgctccgaaaagcccttggaacttggcacgctgtttccctgtgaacaaatccccaatgacgatcatggccatcggcatcatgacaccgccgccgattccctgaagtccgcggaaaataatcagttccgtcatgttgctggccattccgcacagtgcggaagctcccataaaaatcaataaacctgacacatagacgacgcggcgccccaataaatctgcaagtttccccgcaatcggaacgatcgtcgtcgaagttaaaagatatgccgtggtcagccacgtcatcatgcttaatcccccgaggtcacccacgattttaggaatcgccgttcctacgatggtgccgtcaagggctgagaaaaacatggcgatgattaagcccgttattaataatgtgcgttttggatctttcttttcaatgctcatgtttcggcagctcctctttctattcgttttctttttgatcagccgcgtatttctcggcggcttccgctactttgcggatgatgttcacggactgaatcagttcatcgtcagtcagaacggacaggttacgcgccagtatcgctttccgtccttccacaacatcttcgaattttgtttcgccttttttggtgaggctgatgtcgatgacgcgtctgtcctgctggttatgtttgcggacgataagtcctttttgttcgaggcggtcggccatcagcgtaaccgcgctcggctttacctccatgcgttccgcaatttcggaaactttgcagctcccgtgttttttcaggctggctaaaacaaataattgggcaggcgtcacctcgtgttttgccatgctttccaccatttcaggctgtatgttttgcagcagcgtctgaagagatttctggatgtcagacacatattgatccgcgtttttcataactcctcctcatcttgttccttgagaaaataattaacattagttaaatataaataaggattaatgataagtcaatctttttgtgcaaaaataaaaaaaggactgatgcttggcgaaaacatcaaatcctttttcattttactgctggtagggagactgctgctgaatggtctgccggaacttctgatacgattgctgaagcttttgggtatcggcggcttcaatggaataccagccattttgaaacatcacatcgtataatcttctttgcgctttttgtgactcatcgaaaatcgcctgaatatcttgataaagagactcgtggctgaactcgtgcagggctgtgcaatatgaagccgtgatgtatttttccgtcgtcagcagctcattgaccaagtctctgtcattcatttgcgccgtattgggcacgggcgtttgcggattcgtgattttttgattttgctgttccatgtattgtcctcctattgcatatagcctgttgttgtctgtccgccttgaccggggttcaagcggcccaatatgtgctgataatgcttctcatgcatccggccgatctgatcaagctcttgttttaacgtctgattctggcagtgttccgccataaaatgcgcttttttcatggcaagcagattccagttcagcatgtcctcaagatacaaatggtctttcgttgagatgacggcaggcggcaagtttccgtgctgctcttggttgttcatataaacgcctccttcaattctgttctttttagctttctctgcgatcgggatttcatacagataaattaaaataaccacgatttgcaggagagacatcaatatttacaataaaaaaagacactatcagaagaaaaaaccttcggataatgtctgttcatgttaacagttcgatatatgcgaaagtcagcagcggcactaggattggacttcagctgccggtttattgtctagatcagtgccggcttttctttcagttatttttatttttggtaaaagaaaagcagaaaatactccggcaattaatagtataagccctgcgaaaaatacactgcgaagagagtccattaacgctgtcttcattatcggtatgatgtgctttgctatagaatgcggaaattgttcgaatgaaccagaactgaatagcctctgtagcaggacttgaggattgctgctgatcaagtctttgagatgagctgctaatgcgttttcttgttttggaaaattgtctaaaaaaggaactaatttatcggttaatatatttcctgacttggcattcatcactgctcccagaatcgtaattccaaacgtacctccgatagagcggaaaaattggcttgacgaagtaaccacgccgagcgtttctttagagaaactctcttgaagtgccagagtaataatgggcataacaaggcccataccgaagccgatgatagctacataagtagttgcagttaatttgctggtgtcagcttctaatgtggataataaaaaataggcaaaggatatgattgccatccccgtgataatctgcgctttaatgccgattttaaagaccagctgcccgcctataatactggagataatcattgcgaccatcatcggcatcatgattgtcccggactctgatgcactcatgccgattattccttgcatgaagaaagggacgaaggtgattgctgcaaacatcccaatactcataaagaaccctattaaatttaagaagataaaagttctgctttttagaagatgtataggcagaattggttctgcagcttttttttctgcaaatacaaaactaataatacttatagtggccaaagctaacagacaaaatgtctgccatgataaccagtcaaattcttttccgccgaaactgagtgtaagcagcaaacagactacacccgtaatcattgtaaacatcccgatgaagtcaaaatgaatcggacccgtgtattttctggcctgcaatcccatcgcaataaagaacacagctaccattcccacgggtaaattgataaaaaatacccaatgccagctgaaagaatctacaatccatcccccaatttgcggaccgattacagaagcaagagcgtaaataccgccaaatacgccttgaaatctggcacgctgtttgcctgtgaataaatctccaatgacaatcatagccatcggcatcataatgcctccgccaagaccttgtaaacctcgaaacacaattaattctttcatgttatcagccaggccgcacagtgaagagccaatcatgaatataatcagcccggccacatatactgcccggcgccctaatagatctgcaagttttccagcgatcggaacgatggaggtagatgttaataggtaggccgtagtcagccaagtcatcatgctcaggccgccgagatctcctacaatcttaggcataaccgttcctacgattgttccgtccagagcagaaaaaaacatagctataataagtccaattaataaaagtgtacgtttagattttcctgttgaatccaattgaaggttccctcttttcatatgtttcgagcttagtgattcttcaaaataaggtgaatggataactcaggcaggtcccttctttaaattccgttagggaagagaagccatctttaaagatgaaggatcgtaaagctattagaaagaaataataatgctttggaggtatgtttgtgaggcaaagataaattcagcagaattatcattttgaaattctgcttttccttcttaatagatacgttcaataaactgaattatcaattttaaatataagccattgtaaattataaatcaattatcttttaaggaatattttcaaattataaggggataaagaaatataaattataagtttttttgggcgaaatgtaacgaagaagcggaattatagctcgaaaactcaattgaagaagtagtgatttttattgatcctttttgtgactcattaaaaccgtttgaatatcttgataatataatacattgctttgacatcagagtctgtatggatatatgaatgatatcttggcaatctgcatggcttttgtgttttagctttctctgcgatcggaaattcatacacgaataaaagaaaaaggagggagttcatccttgctgcggagcatatgtttatttttgtcgaaaaataaaatgcttacaaaattcgcccaggcttacggaatccgcttcggcgcgggaaggttcgttgcaggggaaacgctcacggaagctgtgaaaacggtaaagcggctgaaccaaaaagggctgtcggcttcgattgattatctaggtgaatatgcgggttcagagaaggatgcgaaaaagacggcggaagaatgtaaaaaagcaatcagggcgattgccgagaatcaactggattgtgagctgtcgctgaaattaacatccatcggtctggatatttccgaggaactcgcggaacagcatgtcagagacatattgacggaggcaaaagaacgcggcgtgcctgtaacgattgatatggaggactattcaagatgcggccgtacgcttgagctgtataagcggtgcaagccggattttccgatgctcggcaccgtcattcaggcttatttataccgcgcagctgaagacatcagcggtctgatgccatataagccgcggctcaggcttgtaaaaggcgcttataaagaatcggcggccgttgcgttccctgataaaaaagcaaccgatcttcattttcagcagctgattaagctgcagcttttgagcggctatgaaacggcggtggcgacacatgatgacgatattatttcgtatacgaaaacactcatcagcgagcatcagattccccgggagcagtttgaattccaaatgctgtacggcatcagaacggagcgccagaaggagcttgccgaagaaggatacaggatgagggtgtatgtcccgtacggaaccgattggtacgggtacctgatgagaagaattgccgagcgcccggcaaatgcggcgtttgtgctgaaaggaatcttcaaaaaataacggctgctccaaaaagcagccgcagtatgttattccatgttgtcttttttatattgctgattttggctcgtccgtttgccgccgccgtatttttgcttcggtcccgcatttcctttcatgctggccgcgctcactgcggcagaagacggatcttttctccctcgcaccattcccttcacctccgggtttaagtttcccgcccgcgccatggaacatgcggaagccgaaaaatttaaaaaaattccatatttgctattgaagtcatcctgaaaatcttttaagatgaaagaagaaaagggtttcattttttttgccgaaaaaatgaatgactattcattcaaagttcaagggggatgactcatgcacaagtttataaagaaagcagccgttctcggatcaggcgtcatggggtccggaattgccgcgcacttggctaacatcggaattcccgtcctgctgcttgatattgtgccaaacgagctgacaaaggatgagatgaaaaaagggctgacattagaaagcccggaggtccgcagcagactgagccgatcggccatgcaaaagctgctgaagcaaaaaccggcgccgctgacttcggctgccaatctcgactatataacggcggggaatttggaagatgacgcagctcaattgaaggatgctgattggattattgaagtcgtcgtcgaaaaccttgacgtaaaaaaacagattttctcactcgttgatgaataccggaaaccgggaagcatcgtgtcgagcaatacgtccggtatctccgtcacaaaaatggcggaaggccgatctgccgattttaaggctcatttcttaggaacccatttctttaatccggcccgctacttgaagcttctggaaatcattccgattcaggaaacagatcctgacgtgctggagtttatgacttcatttgcagaaaacacgcttgggaaaggtgtcgtcatcgcaaaagacacgccaaactttatcgccaaccgcatcggtacgtacggcctgctggtcacggtaagagaaatgctttcttccggctgccgcatcggcgaggtggacacggtgaccggacctttgatcggcagaccgaaaagcgcgaccttcagaacccttgacgttgtggggcttgatactttcgctcatgtggcaaaaaacgtatatgataaagccgacggcgctgaaaaagacatgtttaagcttcctgaatttatgaatgacatgctgaaaaacaattggctgggcagcaaatcaggccaaggtttttacaaaaaagaaggtaaaacaatatatgaactcgatccgctgaccatgacatacggtgagcgctcgaaaatgaagacgcccgctttagaagccgccaaacaggcaaagggtgccaaaggcaaaatgaaagcgcttgtatattccgatgaccgcgccggacgcctgctttggaatatcacatcgcaaacactcttatactcagcccggcttttaggtgagatcgctgatgatataaaagcaattgatgacgccatgaaatggggcttcggatgggagctcggaccgtttgagatgtgggatgccatcggcgtcagaaaatcagcggagcggctcgaagaagaaggcgcagcactccccggctgggtgaaagaaatgcttgatcagggtcatgaaacattttatatgaaggaaaacggaacacaattttattattcagacggccaatacagggctgtgaaagaaaatccgaaacggatcagcctgcagacgttaaaagaaacaaaaggcgttatcactaaaaacagcggcgcaagtctggttgatctcggcgatgatgtcgcgctgctggaatttcatacgaaaagcaacgcgatcggcttagacattattcagatgattgacaatgcgcttgaggaaacggagcggaattataaaggtcttgtcatcggaaaccaaggcagacatttctgcgcgggagcaaaccttgcgatgattttaatggaagcccaggatgataacttcatggaagtcgattttgtcatccgccgttttcagcagacgatgctgaacatcaaatacagcgctaaaccggttgtagcggcgccattcgggatgacactcggcggcggcacggaagtctgtctcccggcggcacgcgttcaggcggcgagcgaatcgtatatgggtctcgttgaaaccggcgtcggtcttattccgggcggcggaggaaacaaagagctgtacatgaattatctggacggcggaagtgaactcatggacgcagcgattaaaaccttcgaaacaatcgcgcttgccaaggtgtccggttcggcacacgaagcccgtgacatgaagattttgtccgcggcagaccgtatcagcatgaatcaggatcacctgctgcacgatgcgaaacagctggctgcttccttatatgacagcggataccgtccgcctgcccgcaaaaaagtgaaagtcaccggagaaaccggctgtgcggcattactgctcggagcagaccaaatgagacggtcgggttatttatccgatcacgatatgaagattgcgaagaagctggcccatgtcattgccggcggaagagtcccgttcggcacggaggtttcagaagaatatttactcgagattgaaagagaagcctttttaagcctcgctggcgaggcgaaatctcaagcgagaatgcagcatatgctcgtcaaaggcaaacctttacggaactaggagggtgtttatgagagaagcagtcattgtggccggtgcgagaaccccggtcggtaaagcgaaaaaaggatcgcttgcagccgttcgtcctgatgatttaggcgcgctttgtgtaaaagaaacgctgaaacgggcaggcggctatgaaggaaatatcgatgacttaattatcggatgtgcaacacctgaagccgaacaaggattaaatatggctcggaatatcggtgcgctggcggggcttcctcatacggtgccggccattacggtgaaccgctactgctcttccgggctccaatccatcgcttacggtgctgaaaaaattatgatcggcgcgggtgataccgtcattgcgggcggtgcggaatccatgtcgcaagttccgatgatggggcatgtgacacggccgaatatcgctttggcggagcatgcgcctgagtattacatgagcatggggcatacggcggagcaggtcgccgaaacgtacggagtatccagagaagaccaggatgcatttgcagtccgcagccatcagaatgccgcaaaagcccttaaggaagggaaattcaatgacgaaatcgtgccggttgaagtatcgctgacagaagtcggtgatgaccataagccgcggaaaaaacaatttaccttttctcaggatgaaggcgttcgtcccggcacgtcggctgacgtcttggcgaagctccgcccggctttttcaaaaacgggaaccgtgacggccgggaactcttcacaaacaagtgacggcgcggcggctgtcatgctgatggatcgcgaaaaagcatcgtcgcttggattggccccgcttgtcaaattccgttcctttgccgtaggcggcgttccgcctgaagtaatggggatcggtccgattgaagccattccgcgggcgctcaagcttgccggactcgaattacaggatatcgggctttttgaattgaatgaggcctttgcttcacaggccattcaagtgatcagatcgctcgggatagatgaagaaaaggtgaacgtcaacggaggcgccatcgcgctcggacatccgctcggctgcacggggacgaagctgaccctgtcactcattcatgaaatgaaacggagaaacgagcaattcggcgttgtgacgatgtgcatcggaggcggcatgggcgctgccggcgtatttgaactcatttaaaaaaagggggaaatgaacatgaaacaggaaacggtcaacgtcaaaaaaggcggcagctttctgattgaagagacgggatatgatcaaatattcactccggaggactttacagacgaacataaaatgatcggcaaaacgacagaagactatgtcgtaaacgatgtgcttccttatatcgatgaaattgaaaaccatcagtttgagcattcggtcagactgctgagaaaagccggagatctcggcctcctcggagcagacgtgcctgaagagtacggcggaatcggcctggataaaatcagttcagccttcattacggaaaagttttcacgtgccggcagcttttcgctatcttacggcgctcacgtcgggatcggttcattgccgatcgtgttcttcggaacggaagaacagaaaaaaacctatttgccggacttggcttcaggacaaagaatcgcggcatacgccttaactgagcccggttcaggttcagatgccctcggcgcgaaaacgacggctgttttgaatgaagcgggcacacactatattcttaacggagaaaagcaatggattacaaactccgcctttgcagatgtctttgtcgtctacgctaaagtggacggagataagttttccgcatttatcgtagaaaagaactatccgggcgtatcaacgggaccggaagagaaaaaaatggggattaagggttcatcgacaagaacgctgattttagatcaggcggaagtcccgaaagaaaatcttctcggcgaaatcggaaaaggccatgtcatcgcctttaatatcctgaatatcgggcgctacaagcttgccgtcggcacaatcggcgcttcaaaacgggtgattgagctgtctgccgcttatgcaaaccagcgccggcaatttaaaacgccgatctcaagcttcacgctcactcaggaaaagcttgcgacgatgtcagcgcggctttacgccatggagagctctgtatacagaacagtgggcttattcgaagataatatgagcagactgacggaagaggagcaaaaagacggacgcgaagtcgcgaagtccatcgccgagtacgcgattgaatgctcgctcaacaaaatgtgcggttctgaaacgcttgattacattgccgacgaaggggttcaaattcacggcggttacggatttatgcaggaatatgaagtggagcgcgcctatcgcgactcaagaatcaacaggatttttgaaggcacaaatgaaatcaaccgcctgatcgtaacgagcacgtttctgaaaaaagccgtaaaaggtcagctgccgctctttgaaaaagcaaaagcgctccaagaagaactcatgatgctgatgcctgaagagccgggctcagaacctcttgaacaggaaaaatacattgtcagacaggcgaaaaagatcgccctcttgacagcgggtctcgcggcgcagaaatacggcaaagagattgaaggcgagcaggaaatcatggtgaacattgccgatattgtcagcgcgctgtatgctttggaatctgccgtcctcagaacggaaaaagcaattgcggcggacggtgccgaaaaagccgcgcagaagctgttatatacggaaatctttgcccaggaagcccttcagaacattgaagcgcacgccaaagaatcactgatcgccatggaggaaggagattccctccgcatgatgctttccgtgctgcgcaaactgacgcgcctgacgccgaaaaacctcattcagaaaaaacgtgaagcggcagcagccgtcttccgtgaagaaaaatatacagtctgatcacatgctgaaagcgctccttcatcaggggcgctttttcatgaagcaacgttataggtttttacaagtgattgtgttaaaataacgacgatcatttacaaggggtgaagaagatgtcgttaaatttttactggtaccctaaatgcggaacgtgccgtaatgcgaaaaaatggctggaagaccgcggtaaggaaataaacgaaatacatatcgcggaggaaactccgtcgaaagaagaaattaaagacctctatgaaaagagcggtcttgagctcaaaaagtttttcaacacgagcggaatgaaataccgcgagctgaacttaaaggaaaaactgtaccatatgtcagaggatgaacagctcgaacttctggcatcagacggtatgctcctgaaacgcccgattacgacagacggcgaaaaagtcactgtcggctttaaagaagaccaattcgaaaaatattggatgtaatgccaggttcaaagaattatggtatcttcttattataagaaaaaaatggagggatttagatgagcacaccgaaagatatgcgttattccaaagagcacgaatgggtcaaagttgaggacggaaaagcccgtatcgggattacacatttcgcgcaagccgaacttggcgacatcgtatttgtcgagcttccggaagtcggcgccgaaattaaagcggacgagccattcggcagcgtggaatccgtcaaaaccgtatccgaactgtacgcaccgattaacggaacggtgacggaagtgaacgaagaccttgatgacagtcctgaattcgtaaacgagtctccgtatgaaaaagcgtggatgatcgtcgtggaaccggctgatgctgaagaaatcgaaaacctcatgacttctgagcaatatgacgaaatgacacaggaagactgatcggatagcaaaggggccatttggacactctatctgtaacgggaggtgtctaaaatggcttttgataaacaaaaggtcgatgtgacggagaacgtcacgggccgctttcaaaacggccggttttccttgtttcatgaaaatgaagccatcggcgagatgacaggcatggaccagtacgagctcaaacagggcttttcatttgaaaatcaaaaattttataaaacagccgatgtcataaacggcagcgatccgaaatatgtcgattgcgattatgagaatggctggtgttaacagttggcggtgaatttcactgccttctttttcaatctgacgctaaaacaatcggcaggtgacgcgcttatgtacaacggagatgaaaaggtcattatcgtagaaggaaaatctgataaaatcaaagtcagggaagtgctcatcgaacccgcggaaatcgtctgtacaaacgggacgatcggccaaaccgaactggaagagttggcggaccgcctgtttgacagagacgtctatattttaacggacgcagatgactccggagaaaaattaagaaaacagctgaaacgggagcttcccgaagcgcgccatatttatatagacagaacatacaggcaagtcgagtcgtgcccgggccatcatctcgcatctgtgctgatcagagccggctttgatgctgacactgtatttttgaaaaagaacgacctgaggtggtaatcatgaaagaactccaagaaaatgaactcgaatcgattcaggatgacgtttatctcctgtatttgtacaccccgttttgcggcacatgccagctggcgtccaaaatgcttactgtcgtcgaagaaatgctgcccggtgccgccttctataaaaacaacgtgaattattcccccgcattcgccaaagcctatcagattgaaagcgttccgtgctttttgctgtttaaaggcggagagcttgttgagaaaggatacgccttccgctccgtttcctatttatatgagctgattaaacaaaaaacatcgcaaacgttcccgatgtgacaatatttacaggaaaatgtcgtgcggtttataaagggttctgtccgttaaaaagagaaagtgtatgtatggccattaaaacgggaggttatacgagtggagaaaatagaagtttcagagaatgacggacagcatctgtttttgaaaccgctattaaacgcctcaacgctgctgattacattccaaggagaaacagaagccttaacggtctcaattaacggacagggagaaatgagaaaaacgtcggcttcaaaggagaaatctaatttgaccttttacggaaaccagacggaaatcatccatctcctgcatggtgatgtctctttgcaaaagcttatccaaagcggaaaactcaaagtgaaaggatcattcagagccctgctgaagctggaggccatcctctggctgacaaacggattttttcaggcgatcagtaaacggccgtaactgccaatctactatgtgacaatagcttccaatatttattttattgactttttatcattcgccgtgctattctacagtaagaatttccggacgaaaatacgatatgttttctcttatcaagagaggtggagggaagtgccctatgaagcccggcaaccatcaacaatgttgaaatggtgccaattcactcaaagcggtctgctttgaaagatgagagaaaggcctttttcaataagcctttctgctcatttttgcagaaaggcttttcttttgcggagaaacccggaagatttcttagaatagtgtaaggcgggtgattgctttgatccatcttcaaaatgtttcaaaaatttacaaagcgaagcatggggatgtcaatgctgtccaagatgtcactcttgatatcaaaaagggcgaaatatttggaattataggatatagcggagctggtaaaagttccttaatccgtctcctgaacggccttgaaaagccgacgtcgggaaccgtggaagtcgcggggacggaattaaataaagtaagcagccgcgggctgagaaaagcgcgccaggaaatcagcatgatcttccagcattttaaccttttgtggtcgcgcaccgtccgggagaacattatgttcccgctggaaatcgccggcgtgaaaaaaagcgaacgggtccgccgcgctgatgaattgattaaactggtcggattagaggggaaagaaaaatcttatccgtcgcagctgagcggcggtcaaaagcagcgtgtcggcatcgcccgggcgctcgccaataatccgaaagtccttctgtgcgatgaagcgacatcagcgctcgatccgcagacgaccgattcaattttggatcttttatccgatataaatgacagactcggtctgacgatcgtgctcattacccatgaaatgcacgtcatccgaaaaatctgcaacagagtcgccgtcatggaaaacgggaaagtcgttgaagaaggcgaagtactccaagttttcagaaacccgcgcgaaccgatgaccaagcgtttcgttcagcaggtgacagaaccggaggagacgaaagaaaccatccagcattttctgcaggaaacagcgacagggaaaacgattcagctttcatttgtcgggcaggccgccgagcagcccctcattacggaaatgatccgaaactttgatgtggacgtcaatattctgcaggggaaaatttcacagacgaaggacggagcttacggttcattattcattcatattgacggtcaggaaaaagaagtagaaaacgtgatccggttcatcaaagacaaacaggtagaagcagaggtgatcacaaatgtttgaaaaatggttcccgaacgttgatataaccgagctgtggacggccacatatgagaccctttatatgacggtcatcgctttagttttttcatttatcatcggagcgattctcggtcttctgctctttttaacgggcaagggaagcttatgggaaaataaaatcattaacaccgtgattgcggcggtcgttaatattttcaggtctattccgtttcttattttaattattctgcttctcggctttactaagattctggtcggatcgattttaggaccgaatgccgcattgccggcgctgattatcggctccgcgccgttttacgcccgtcttgcggaaattgcgctccgggaagtcgataaaggagtcatcgaagctgccagatcaatgggagcaaagacatcgacgattatcttcaaagtgctgattcctgaatcaatgcctgcgttaatttcaggcatcaccgtgacggccatcgccctgatcggatctaccgccattgccggcgccatcggttcaggcggactcggaaaccttgcatatgtagaaggctaccagtccaataatacggatgtaacgtttgtagcgacagtatttatactcatcatcgtctttatcattcagattatcggtgatgtaattacaaatataatagacaaaagataagggaggatttacattgaaaaagattgtattaagtgcgctgctgcttgtgttcgcgggagttttagccgcctgcggatcaaacggctcgaataaaaaggaaatcgttgtcgccgcgacaaaaacaccgcatgctgaaatcttaaaagaagcggaaccgctcttgaaggaaaaaggctacacattaaaagtaaaagtgctgaacgattacaaaatgtacaacaaagcgttagctgataatgaagtggatgcgaactacttccagcacgttccttaccttgaacaggaaatgaaagaaaataaagattacaaactcgtgaatgccggagccgttcaccttgagccgttcggagtttacacgaaaaaatacaaatcactgaaagacctgcctaaaggcgcgaccatcatcatgactaacaatgtcgctgaacaaggccgtatgctggcgatgcttgaaaaagccggactgatcacacttgatccgaaggtaaaaacgattgaagcgactacgaaaaacattacgaaaaacccgaaaaacctgacattcaaaaaaatcgcccctgaattaacggcgaaagcatataatgaagaagaaggcgatgcagtcttcattaacgtcaactatgcgattcaaaacaaactgaatccgttaaaagatgcgattcaagtggaatcaacgaaaaacaacccgtacgcaaacatcatcgccgtacgcaaaggtgacgaaaaatcagagaaaatcaaagcgcttatggaagtccttcactctaagaaaatcaaagactttattgagaaaaaatacgacggagccgtgcttcccgtatctgaataaagcgaaaaccccggatgaatcatccggggtttttttcgggtattaatcggagaactgtccataataaaaaggaaggttaacgattggagggaatggcagtggctcaataccaggataacggaaaaagcgtgcatgacgcattgaaacaatataaagaaggtttaggcatattcgagcaaaaaatgcccatgatggggcggaagtttaatgaatttactgagcagtgtttctcagcggattcattaactgaaaaagagaaacaattaatcgctctgggcatcagcatcagcgctcaagatgaattttgcatgatttatcatacgaagggctgccttgaccaaggggccacagaagaaaacatccttgaggtcatcagcgtcgcggcggcattcgggggcggcgcggctctcagtcagggagtgaccctcgtgcagcagtgtattcaggaattcggacatacgacgcattagaatgagcaatcgtgtgaataccgtttttcagataaagcgagcgccggtttccggcacattcgaaaggattcaggggcacaccctctttggccggagcagcggatcattgttacaatagaaacaaatatatgaagggattgattcattatctgcaccagccacgagagactggaccttgactatacgcctgaaatggaaaaagcgatgcagaagtcacacggcatcggctacgaggaatacggacggcgtctttcaaaaaggatggaagtcgaacggcagagggagcttgaatatcaaaaaagcaagttcctcgcagcgcagcttaatgagaaaatcggtcagtaaaaaagggtggatttccgccctttttctgtttcaaacagctttaattacgccttgatctttgataaactttaggaatgttccgggtaatataaaaagttgtatttacttttcatttgttataaaattagaatgagaataaattgagaataatgattatatattttggaggtatagatatggctgcttcaacattaacgatcaaggatcttcacgttgaaatcgaaggaaaagagatcttaaaaggtgtaaaccttgaaataaaaggcggcgaattccacgctgtcatggggccgaacggtaccggtaaatccacgctctcagcagcgattatgggacacccgaaatacgaagttacaaaaggaagcatcacgcttgacggcaaagatgtactggaaatggaagtggacgagcgcgctcaggcgggtcttttccttgcgatgcagtacccaagcgaaatcagcggtgtgacaaatgccgatttccttcgctctgcgattaacgcacgccgtgaagaaggcgatgaaatttctcttatgaaattcatccgcaaaatggacgaaaacatggagttccttgaaatggaccctgaaatggcgcagcgttacctgaacgaaggtttctcaggcggggagaaaaaacgcaacgaaatccttcagcttatgatgatcgagccgaaaatcgccattcttgacgagatcgattcaggtcttgatatcgatgcgcttaaagtcgtttctaaaggaatcaacaaaatgcgcagcgaaaacttcggctgcttaatgatcactcactaccagcgccttctgaactacatcacgcctgatgtcgttcacgttatgatgcaaggacgcgtagtgaaatccggcggcgcggagcttgcacagcgccttgaagcggaaggttatgactggattaaacaggaactaggcattgaagacgaaactgtaggccaagaagcgtaagcgttagggggataatcatgacattggaaacgaaactatccgtagatcaggaatatgtcaaaggcttttccgaaaagcatcaagaacctgcctggctgaaaaacctgcgcttacaggctcttgaaaaagctgaagatctgccgctgcctaagcctgataaaacaaaaatcacaaattggaactttacaaagttcaacaagcatacagtagaaaacgcgccgcttgcttctttagaagatttagctgatgaagcaaaagcgctgatcgatatcgaaaacgaagataaaacgttatatgtgcagcgtgatcaaacgcctgctttcctttctctttcaaaagaactgaaagacaaaggcgttattttcacggacatcttaacggctgcccgtgagcacagcgacctcgttgagaaatacttcatgaaagacggcgtaaaggtcgacgagcataaactgactgcgcttcatgcggcattaatgaacggcggggcattcctttatgttcctaaaaacgttcaggtggagacgcctgttcaggccgtttacgttcatgaaagcaatgacacggcattgttcaaccacgtgctgatcgtcgctgaagaccacagctccgtcacttacgttgagaactacatcagcacggtgaatccgaaagaagcggtattcaacattatcagtgaagtggtcacaggtgataatgccagcgtgacgtacggcgccgttgacaacctgtcagcaggtgtcacaacatacgtcaaccgccgcggagccgcgcgcggacgagacagcaaaatcgagtgggcgctcggactgatgaacgacggcgacacgatttctgaaaacacgacaaacctctacggagacggcacatacggcgatacgaaaaccgtagttgtcggaagaggagaacagacggaaaactttacgacgcagatcatccacttcggtaaggcttctgaaggctatatcctgaagcacggagtcatgaaagatgccgcatcttccatctttaacggaatcggcaaaatcgagcacggcgcgtctaaagcaaacgctgaacaggaatcccgcgtcctgatgctgagtgaaaaagcacgcggagatgcaaacccgattctcttaattgatgaagacgatgtaactgcaggacatgcggcatctgtcggccgtgtggatccgatccagctttactacttaatgagccgcggaattccgaaagaagaagcggagcgcttagtcatttacggattccttgctccggtggtaaaagagcttccgattgaaggagttaagaaacagctcgtctccgtcatcgaaaggaaagtaaaataatgaatatcaccgatattcgtgaacagttcccgatccttcatcagcaagtgaacggacatgacctcgtgtaccttgacagcgcggcgacttcccagaagccgcgtgctgtcattgaagcagtggatcagtattacagcaaatacaattccaatgtccacagaggcgttcatactcttggcacgagagcgacagacggctatgaaggtgcgcgtgaaaaagtccgtaagtttatcaatgcgaagtcaatggctgaggtcattttcacaaaaggcacgacaacttcactgaatatggtggcgctgagctatgcccgcgccagcttaaaacccggtgatgaagtggtcatcacccaaatggagcatcatgcgaatatcattccgtggcagcaggcagtaaaagcaaccggcgcgactttaaaatatatcccgatgcaggaagacggcacgctttcgctggacgacgtccggcagactgtcacaagccatacgaagatcgtggcagtcgctcatgtgtcaaacgtgctcggcacgattaacccgattaaagagatcgccaaaatcgctcatgacaatggcgctgtcatcgtggtggacggggcgcagagcacaccgcacatgaaaattgacgttcaggacctggattgcgacttcttcgcgctttcttcccataaaatgtgcggcccgacgggaatcggcgtgctgtacggcaagaaagaactgcttgagaatatggaaccggccgaatttggcggcgaaatgatcgactttgtagggctttatgaatcaacttggaaagagcttccgtggaaatttgaagcaggcacgccgattatcgcaggcgcgatcggattgggagccgcgattgattttcttgaagagatcggactcgacgagatttcccggcatgagcataagcttgcagcctatgcgcttgaccgtttcgagcagctggacggcgtgacggtatacggtccgaaagagcgggcgggacttgtgacatttaatcttgatgaggttcaccctcatgatgtcgcgactgtcctcgatgctgagggcattgcggtcagagccggccatcattgcgcccagccgctcatgaaatggctggatgtatctgctactgcgagagcgagtttttatctgtataatacagaggaagagatcgataagctcgcggaagccctccaaaagacaaaggagtactttacaaatgtcttttaatgcaaatttagatacattatacagacaagtgatcatggatcattacaaaaatccgcgcaacaaaggggttttggatgacagcatcgtcgtcgatatgaacaacccgacttgcggcgaccggatcagactgacaatgaagcttgacggcgataccgttcaggaagcgaagtttgaaggggaaggctgttccatctccatggcttcagcttccatgatgacgcaggccattaaaggaaaagatattgataccgccctttccatgtctaagattttctcagacatgatgcaagggaaagagtatgacgactcaatagatctcggggatattgaagcccttcaaggcgtttcgaaattcccggcccggattaaatgtgccaccctttcatggaaagcacttgaaaaaggagtcgctggcgaaaaaggcggcaattaaaagattggagtgaaaatggatggctaaaaaaatgcctgaaattggtgaatacaagtacggttttcacgataaggacgtttccattttccgttcagagcgcggattgacaaaagaaatcgtagaagaaatttcacgcatgaaagaagagcctcaatggatgcttgatttccgcctgaaatctcttgagcatttctacaacatgccgatgccgcagtggggcggggatttaaactctttaaactttgacgaaattacgtattacgtaaagccgtctgagcgttcagagcgttcttgggatgaagtgcctgaggaaattaaacagacatttgacaaactcggtattcctgaagctgagcaaaaataccttgccggtgtttctgcacagtacgaatccgaagttgtgtaccacaatatgaaagaagatcttgaagcgcaaggcattgtcttcaaagacacagacagcgcgctgaaagaaaatgaagacattttccgcgagcactgggcgaaagtcattccgccgactgataacaagtttgcggcgctgaactcagctgtttggtccggcggatctttcatctacgtgcctaaaggcgtgaaggttgaaacaccgcttcaagcttacttccgcatcaactctgaaaacatgggtcagttcgaacgtacgctgatcatcgttgacgaagaagcaagcgttcattacgtagagggctgtacggctcctgtgtacacaacaaactcgcttcacagcgcggttgttgaaatcatcgtcaaaaaaggcggctactgccgttatacaacaattcaaaactgggcgaacaacgtttacaacttagtaacgaaacgtacggtttgtgaagaaaacgcgacgatggaatgggttgacggaaacatcggttctaaattaacgatgaaatatccggctgtcattctgaaaggtgaaggcgcgcgcggcatgacgctctctatcgctcttgcgggcaaaggacagcatcaggacgcaggtgcgaaaatgattcaccttgcaccgaatacgtcatccacaatcgtatcaaaatcgatttcgaaacagggcggaaaagtaacataccgcggtatcgtccacttcggacggaaagcggacggcgcccgttcaaacatcgagtgtgatacgctcattatggataataaatcaacttctgatacaatcccttacaatgaaatcctgaacgacaacatttcattggagcacgaagcgaaagtatcaaaagtttctgaagaacagcttttctacttgatgagccgcggtatttctgaagaagaagcaacagaaatgatcgttatgggcttcatcgagccattcacaaaagaacttccgatggaatacgcagttgaaatgaaccgtttgatcaagttcgaaatggaaggctccatcggttaatagtaaaaccccgccatatggcggggtttttttgtttattgaatagtgaaatttccgtattcgcttgaccggacatgaatcggcccgtttaaattgtagttcttctctttgacaatatcgcggaaaacgtcgacacgggcaaccgattctctccattcatcctgggtgtcctcatctgccggattcatcagatcgtcatagcgtacatccaagaatttattgagccatttcttctcgtccgttccgtctttcggtgacccgcccatttttttgttcgtgcgtttaatcagggcataaaaggagtctggatcatcaccgtcaccatgctgaatcaccgtatcgtacatcaccgctttggccaaggccgttttcagtccggcattttctgaacgtttcatcgccggctgataatacaagctgtcgtttaccttatcctgggcagcgcggaaggctttatcattgccaagtgagcgccaggcagaagcgaatcctttcagattgctgatgtcatcgctttcgtccttcgcaagacgacgcaattcaggcaaatactttttcaatttgttattcggcaccgctttcgtatatacttcgactacttccagcgcatctccggtagccgtcgtaaagccggcccgcccgcaagtgtaacctcttccgtcatccaacgcttcaacatatccgtattggatttccgtctttccgttttcaaaaatgctggtcagctgttccgcacggcgcttctgatccttattcagcccggccgcaaaaaccgtaccgctcatcatcagggtaaaaaacatggtgaaaataagagatgaaaccgccgtcttcttccaaaaacctgcttttttcttcaaattgattttcattgccatacccctttcatatgtaagttacgcactcagtatacatgagggggtgatttttttgttgaaaacacacgaatttgtcaatattttgaatcctaagccctatccagcgcttcataaaaagaacgcaccaccttcaccagacagacaatcccgttctcgcatcattcttatctgtaacatagtcaacgcggtgaaacccgcattgtacagcctgctgaaaaagggcttcgagcatgtccggatctttgcaatataacgttacatacgagcaatctgcgatgagaagcacaagttcacaggaactatccaaatattctcatacgtattgatttccgttaccatcccgctcgggaaagctttcaattcagcacacaacatttcaggcagaaaagagagggaacgggcgatcacggaaatggtgagggtgctgaagcctggcggcacattggccgtgtcagatataaaaaatacatcacaatacagagcaattcttgaggaaaacggctttcagacaagaacgtattccttttattatacgtttccgttttcgaaacttatcattgccgtcaggactccggtaggaaccgggcgctctatttgttaaaataaataagacaaaacagatagaaaaggtgttacacatgaagtcttatatgattatcggagccggcattctcggtgcgtccgcggcttatcatctcgcaaaggccggtgcggatgtaacggtctttgacaggaaacacccggggcaggcgactgacgccgctgcagggatcgtctgcccgtggctgtcgcagcgccgcaaccaggcatggtatgcgatcgcaaaaggcggagcccgctattataaccaattgatacagcagcttgaagctgacggagaaacggacaccggctatcaaaaggtcggtgccgtcagtctccatacggatgaaaaaaagctcagccaaatggaggaaagagcttataaaagaagagaggacgctcctgaaatcggtgacattacgagactgactccggcagaaacgaaggcgctgttccccgcgctgtcggaggaatacggggcggttcatgtcagcggcgcggcccgggtgaacgggagggcgcttcgtaaggcgctgttaaacgcggccgttaatcacggcgcggctgtttacaatgaagaagcgtcaatattgacagaggacggtgccgttatcggtgtgaaaaccgcagaacgcacgcttactgccggccaggttctcgtaacggccggcgcttgggcgagagagctgcttgaaccgctcggcatccgtttttcagtatcataccaaaaggcacagatcgttcatttagagcttcagggagaggatacgggcggctggcccgtcgtcatgcccccaaacgatcaatacattctcgcctttgacagcggcagaatcatagcgggcgcgactcatgaaaacgataccggcatggatttgcgggtgacggccggcggcctccgcgagatttttgacaaagcattaactgtggcgccggggctttcagacagtactgtgatagagacaagagtcggtttcaggccgtttactcccggttttcttcccgtcatcggcaaagtgccgaatatcagcggactcctcgttgccaacgggctgggcgcctcagggctgacgagcgggccgtatctgggggcggaactggcgaaactcgcactcggccagcagacggaaattgatttgagcctttatgatccggccggggcgcttgaataaaaaatagcttttggcgcattcttatgataggatggagctttaatgaataagaggacgtgacccattttgataaaaataaaccttcctgctcctgatgtaacgattacggaacggcagcagtcaccgtcggaaaatgaaccggcgattaaagcgatttacggtttcattgattttcaccgcattccgagagacaaaggcggcatctttatgttttataacattcatgatgaactgctgtttgtcgggaaagcccgtaaattaagacaaagaatcaaaaagcattttgaagacaatgtgtcgcctgttaaacatcacagggacgaagtgtataaaattgaagtatgtgtcgtcaatgatccgatggaaagggagatttacgaaacgtacgcgatcaatacccttcagtcgaaatacaacattgagaaagtattttataaataagaaaaaccggagcttaagggctccggttttctttatgtttacagtgccagccacatcactgcaatatgcacgatcagcagacagtaaacgacgaggaacagctgaacgaccttttttctgaataacatgcagatcatcatgagcacaggaaaaatcaggacgccggccgttttattgattgatgtattcggacggttcgacacgtcatagtgaatggccatatcagcaggaagaaacggataaaacacaatcgacagaataaaggcgagaaccacagctccccacagcaccttatcattcatcaaaaacatatgaacactcccttttttacctataatagtattttagtgtgaaaaagttcatttttcagtatttatttgatggctgtgtgctgtatgggtatttttaaacgcggcggccgccattgagacgatcgctcttgcggtagcggccatcattttgacagtagcaagcgttgacgaagattccgatttaggaaaagagcagctcatcgctaatgtcgttgaccgcattaacgcacagcactgaggatgaagaaagaaaacgctaaggagacgagccttagcgtttttttgattgaagcatctgttttaaatatgcttctgaatcaaagccgagttcctcgtcggcttcttttttcagttcaagctgaagtcgcacatacgtgtcatatttcgggctgagcttttgaagtagattgctgaaaggcgatccttccttcagcgcgggcagatcagaagcggattctccgatcttgatcaggctttctctgtactcttcatctgtctccactcttttcacaagctgaatgatgatgtttttatgagtgtcccaagtggcggggtctctctccaaaatccgctcgataaattggtcatgctggactttgtgctgttggagctgagccgggtcctccttaccgaccagctgcatcatcgggtgtgcagccggaacttcttccatatcatccaatactttaataagctttgcccatatcgtttttttctcatctgtatcaatagaaaagtcgaggaacggttcaaacagcgcggcgataaattctccgaaatctcccgggaacagttttttcagctgaagtcccatatacttcggttcatctattttgacctcgccgatatcatgcagaattgaatcgacattttccgcatcttccacgcgcttgatcagcatttcagtcagtttccgttcctgctcaagctcttcaatctgccggctgagcttttgatgctgctggcgcagtatatcatgcagactgctgccctctaagaggaacgctttaatatcgcttacagacagtgccagcattcggagggcggcaatcattttcagcgtattcacgttctgagcggaatactcacggtatccgttatcagggtttttgctgacggtgattaaaccttcctgctcataatatttgatggcttttttcgtgagacccgtctgcctggcggcttcttttatattcattctgaatcactccctgcttttcattctaaacgtgtctctaagggtcaggtcaagaaagggcgggaaattagacgggtttattctatattttagaaatttcagaaaatatgattgacaacgcacctttgttgcgattaatataacgttatataatgttatataacattatataataaaacactgaggagtgaaggatttgagtcaaactgccgcacaagtgaatcacaaggttcaggctttcttggatgatctgaaaggaaaaacgattgaccacgtctttttcgtcgcttgcgggggttcttcagccattatgtatccgagcaagtacgtgtttgacagagaggcgaaagccatcagctctgatctctacagttcaaatgaatttattcagcgcaatcccattcagctcggagagaactctctggtgattttatgttctcagtcaggcaatacgccggaaacggtgaaagccgccggtttcgccagaaaaaaaggcgcgcttacgattgcaatgacctttgagcctgattcgccgttagcgaaagaagccgaatatgtcgcggtgtatgactggggtgagaacgcacaggcgataaatacgaattacggggttctgtatcaaatcgtgttcggcgctttacacgtgctggaaaaccatcccgcgtttgagcaggcgatcgacggactcaataaactccagaccgtatatgacaaagcgcttaaacaagaagcggatcacgcaaaggcattcgcgaaagcccacgaaaaagaagatatcatttacacgatggcaagcggtgcgaactacggcgtcgcttactcctacagcatctgcattctcatggaaatgcaatggattcattctcacgccattcatgccggagaatattttcacggaccgttcgaaatcattgatgaatctgttccatttattatcctgctcggcttagacgaaacaagaccccttgaagagcgggcgctttccttctcaaaaagatacggcaaaaaactgactgtgcttgatgcggcagcatatgatttttccggaattgacgattctgtaaaaggctacctggctcctctcgtattaaaccgggtgctcagaagctatgcggatgcgctggcggaagcaaggaaccatccgttaagccagcggcgttacatgtggaaagtcgaatattaagaacgcgcattatatttcaccggactataatgatatataacgttatagtccggtgacaaaggaggaaaagcatctgaaaaagctcatctgcctgttcgttctgttagctgtatgtctgtcagccgccgcctgttcaagccaaagcagttcctctgacggaaaagtgaccctgaagttttttcacaggtggccgaaggagccggaaaaaagctattttgaagaagcggtcaaagattttgaagccgctcatccggatattcatatccaaacggaagcggtcttaaacgattcttataaagacaaggtgaaagtcatgctcggaacaacgagcccccctgatattttcttttcatggagcgaccggtttgcttataaattcatcaaaggagataaagccctcgatctgtcgtcttactatcagcaggataaagattggtcctcacagcttgtgcagtcacaaatcaaaccctttacgcatgacggaaaacagtacggtgttccgtggcaaatggacgctaaatcattcttttataataaagacatttttaatacattacatttgaagcccccggcgacatgggatgaactgatcacagtctgtgagaaattgaaagagaacggatatattccgatcagtttcggcacaaaagcgccttggaccatttctcattatatcgggacgctgaaccagcgtatggtggatgaaaaaacgcgggcgaaggattacagcccggaaaccggggagtttacggacgaaggctatgtcaaagcgcttgaaaagcttcaggaacttctgccgtactttacaaagcacgtgaactccgttgatcacgaatacgtgcgccagcagtttacgagcggcaaagcggcgatgatttatgcggaaacggcagaaattaagctcgtcgaaccggtcaatctgggcttgtttcctttcccgaaaatcagcggcgaaaagggatctccccgtgcactgaccggatctcccgaaggatttatgatttcctcaaaaacgaagcacccgaaagaagccatggaatttcttcagtttttaacctcgaaaaaaatgggagagaagctgataaaagacgtcggtaaatacagcgcggttcagggaacggcgacagaaaacaattccaccccgatccagcgcgaagccgtgcaggatatcgtccgcgccgaaacaatggtgccgtggtttgatatggatgttgacgttgaaatcgccgatgtgtatgcggcaggcgttcagcagatgctcggcggcacaatgacaccgcgcgaggtgatgaattccgtgcagaaagcggcgcgtcaggtcaaagcgtcatctgaatagaacagatttctttggagaaaggagatgaggatttctttggtcagccgaaagcgtttcattccgtatctgtttctcgcgcccgcgctggtttttctgctgttcgtttacattccgattattgagaatgtgtttttcagtctgtttgaatggagctcatttcaacccgaaaagacgtttatcggtttgaaaaattatattgacctgttccacgatcccgtgttttttacagcactccgcaacaatgtgctgtatgcggtcatatcgctgatttgccaggttggcggcgggttaattctggcggccgtgctggaagacagattggtaagaaaatggtcgccgtttttccgtacggtattttttcttccggtcgtcatttccatgaccgtcattgcgctgttgtttgattttatttataacccggaaatcgggcttttgaatcagctgctggaagccgtcggacttgatgaactgacccgggcgtggctgggcgatgaaaacaccgctatgctgtctgtcatttttgtgtctcaatggcagtctgtcggttacatcgccatgctgtacattgtctcgattcagagcattcccgctgaattatatgaatcggcgcagctggacggagccggaaaaatccagcagttttttcacattacggtgccgcagacgaaagaaatgtcgtttgttgccgtggtgatgacgctgaccggcgcatttaccgtatttaatgaaccgtatattctgaccggcggagggccgggcaatgcttcagaagtgctgagcacatttttgtataagagcgcttttacaaaggatatgatgggctacgcttctgcgatcgcgacggtggtgcttttgctgacgcttgctctgtcgcttattcagatgaaattctttaagaccggaaaggaggagtaggccgatgcttcctgaaaagacggacttgcgtcatgcccgtcaggccgtcagaacaggcggaaaaccgagaaaatggtatgtcggggaaacgtctgtgtggctgtttctctttatctacctcattgccgttgcttatccgctgttatggatggcggtcagcgcctttaaaagctcggatgagatttttgagcacagctggtcgctgccctctgtctggcatcccgaaaacttcgtatccgcatggaaccaagggatttccgcttattttatgaacagcgtcattgtgaccgtgctgacttgtctcatcaccgtatttgtgagtgcctgggcggcatacgggctggcccgttttcaatttaaaggaaaagggtttgtgctgatcatttgtcttggcggcttgatgctgacgccgcaggtcagtcttgtgccgctgtactccattatccagtcattgggactgtacaatacgtattgggcattgattcttccgtacgcagcctatcgtattccgtttaccgtgattctgatccgttcctattttttgtcgatttccaaagagcttgaggaagcggcctatctggatggatgtacaagtttcggaatatttttcagaatattcttacctatgagcgtgccgattctggtgacatcaggcattttgacggcttaccatacatggaatgagtttatgtttgcgattatttttatcgatgatgaaaatttacggacgattccggccgggctgatgcagttcagagatgcgctgcagacggattggggcgtgctgctggccgggctgacgatttctgctgctcctattatcgcgctgtttttattaatgcagagatattttatccgcggcattgcagcgggaagcgtgaaaggataagggggatgaaaagatgaaactgatagcggccggagataatgtagtagattattatcaggatcaggagacgttttacccgggcggaaatgcgttaaatgtagccgtgcttgcccggcgcttaggccacgaaacttcttatatcgggattctcggcagtgatgaagcggcggatcacgtattgaatgtgctgaaactggagaaggtgaatgccgatctgatccgccgggcatacggagaaaacgggatggcggtcgtcacgcttgatgaaagaggggacaggatatttgccggatcaaataaaggcggcgtgcaatcgcgtctgacgctcgcttttcaggagaatgacatctcatttatcgccggacatgatctgctgcatacgagcgtatacagcaggatagaacgtgaccttccgatgctgagcggccatgtgccgatttcctttgatttctctgtaaaacgtgacgaagcctatttagaagcggtctgtccgtatgtgacgtatgcgtttttttccgggagtgatttgagtgaaagtgaatgtgtgcggcttgccgaaaaagcccgcggtttcggagcgaaaatcgtttgtctgacaaggggagaacatggcgcggtgttatcggatggggaacgcgtctatcatcagccggtggtaagagctgatataatagatacattgggggcgggtgattcttttatcgccgggtttcttaccgatttcttcgaacatcaggatattcggcgagcgcttactgcggccgccgggacggctgccaaaacatgcggggggttcggagcgttcggttacgggcatccctacaggccggacggcgggaaaagcagtgaaaaaacgagaatacgataagcattgtctcgttttttatacttgttacgcataggggctgttaatggtaaacgtgacgcggtcggtatgcattaaaaacagcgaactgtatatcggctgttcttttgacataaaagcggttttgtcaatttcaaaaagcgcatccccgatatcacaagccagatagcggctttcttcctgcttggcgtatacgacatttaacagtttcgtattatgggtgggcaccacctgatagtgctgtttcaaaatgtcatgcatcgacacgccgcctttaatatgcttgccgatgtcgggaaataaactgagcggatagtgggcgatttcgaatgagagcggctggtcgtcgtgaaataaaatgcgttttaattcaagaacgggactttcggaagcgacgcgaagtttttgagcgatggatttaggcgcttcaatgatttcatgggaaaggatctggtgtttcggtttttttcccgttgattccataaattcagagtagccgttgaccgcgatgagctcccgcttcagtttagggcttttaacgaacgttccctttccctgctgccggacgagccagccttcttccacaagatcaaggatggccttcctgactgttatgcggctgacgttgtacgtttcgcacagctcattttcagtcggcagttttacggacggcgaataaacgcccttcttgatatcgtccgcgataatttgtttcagctgaatatataaaggtttcgagctcccgttatttaacaatgggacggacctcctttgtcaagtagtagtactattatatgtattatgatgttataatacaaatttgcctttcatttatgaatctgtcagaaaccccgaacatttttaacataacagaaagatgtggcggtttccagtattggaggaggtttcgaatggcatcattaacatttgaccatatcaaaaaaacatacggcgcccaatcggcggcagtgaaggattttcacttagatgtaaaggatgaggagctgctggtgcttgtcggtccctccggctgcggcaaatctacgacactcagaatgattgccggactggagagcatttctgaagggaagctttatatcgatggagacgcggtgaacgatctgcccccgaaggatcgtgatatcgcaatggtttttcagaattacgcgctgtatccccacatgacggtgtttgataatatggcgttcggtttgaagctcagaaagctgccgaaaaaagaaatcgcagagcgagtccggacggccgctgatattttggaaatcgggcatctgctcaagcggaaaccgaaggctctttcaggcggacagcggcagcgggttgcgctcggccggtcgatcgtgcgggagccgaaagtgtttctgatggacgagccgctttccaacttagatgcgaaactgcgtgtgacgatgcgcgccgaaatcagcaagctccatcagcgtttgaaagcgaccatcgtttatgtgacgcatgatcagacggaagcgatgacaatgggtgaccggattgtcgtcatgaatgaaggaaatattcagcaggccgcaagcccccatgagatttatcattatccggcgaatatgtttgtggcgggttttatcggttctccgagtatgaattttataaaaggcgtcatagaagaaagtcacgggcaatggtattttgccggttcgtccgttcgtctgcccattccgaaagaaaaagcggccgttcttgtgcagaaaggatacagcggtcaggagatgactgcggggctgcgtccggagcatttgacgcttgccggacaatcagagcacccgcctgaagcggtgtgccgcgctgtggcggaagtatgtgagaacttaggcgcggagatgtacgttcatgcggtgagcggagatgaccgcatgacgatccgccttgacggcgcttcagaggtgaaacccggcgatgccattctgcttgcggtcaatatgaaccgggccgtgttttttgatgccgacactgaaaacgccgtatattgaaaaagggagcctgatgatggggctcccttatcacttcttatgatacgattaccagatttcgtccgcccattccgggtggtcgataaacggattgcggttatgctgatagtcttcgtaaatgatttcgttccgccgtttttccttactgtcgacggggtcttgtttattccatttgagcaaaacggacagttttcccatgtaaggagctgagccgtttccggttttatcattcagctcaaggtcgggatacccgtcgccgccttcataacgcaccgccatgtaaaacagcatgcgggcgacgtctcctttgacctcatcgcgcggctcccaggaatcaccgtcataataattgcccggcgctttcgggtattctgagccgccgttatcaaaatccatgtttcctctggcgctgttcacctggacgtctgcagggcgcagatgatgaatgtccgtcccggggccggcagctgttccgaagtttccgtgtgactttgcccacacgtgttcacggttccagtccccgacgctgccgccgtttttacttttggcccgtgattcctgggtgtagagcaagatgacattgttcgggtttgccggatcttcgtcagtttccttcaatgcattccatacttggctgtaagacagctttgtatgtccgctgatgatgcggtgcagggcgctctttaaggctgttccgctttttccggaagcttctttgtaatatgtctccgtatccgcagacggagtgatgacagctgaggaagtttgcggaaaaagagttgtgccgccggcagttgaaaccgccagccggctgtacagattcgtgtcagccggcgcgcccgcagaggctgacggcgcggtccaacccaaaatgaaaaacaggcagacaatcggcagaaaccaaagtttttttgtcatgacttgccctcctttacctctattatccaaaaaataaatctaatattctatcttttttgaaaaatggttccttcggcttatgggacagaggggcggtttcttggtcaaagtatccggaaaatcattgattttttggaagatatgataatgaactcgttatgcgctccttctataatgaagatcatcttgtcagtttttcagtttaaaaggagggcatatatggaacatcagcagctttcggcggcgaatatcgggatttccgatgacatacaatggctgtctcaattcggcgcttccgcttccggcggagtgacgaggcttttatatacgaaagaatggatggacgcccagcttgccgtcaaaaagaaaatggaggcgttcgggctggaaacggcatttgacgatgtcggtaacgtgttcggccgtctgagcggcacagaatcgcctgatgaggtgattctgaccgggtcgcatattgacaccgttattgacggcggcaaatatgacggtgcgttcggcgtgctggcgggcatgctggcgatccggcatttgcatgagacgtgcgggcgtccgaaaaaaacgctggaggctgtgtcgctctgtgaagaggaagggagccgttttcccatcacctattggggctcaggcaatatcaccggtgctttctcgctttcagatgcggaaacgccgaaagacgcgtccggcatttctctgaaagaagccatgcggcagaacggcttcggtgcaggccgttatccggcgccgctgcgcactgatattagtgcctttctggaaattcatatagaacaggggcaaacgcttgaacgatcgggaaaggatatcgggattgtcaccgggattgccggacagagacgctataccgttacgcttgacggtgaatgcaaccatgcggggaccacttcaatgaaatggcggaaagatccgctcgcggcgggaagcagcatcatccatgaactcatgctctcagcggaaagacagccggaagagctccgcctgacgtgcgggaaaatgacggttgagccgaatatggcgaatgtcattccgggccgtatccagttttccgttgatattcgccaccagcaggaagacgtgctggcagccttccatcagaaactggtgtcgattattgaaaacatcagccgcagcaaaggagtcagaccctttattgatgaatatatgaggatagagccggttcaaatggatcacatactgacacgaaccgcagcacaggctgcaaaagagcagggggcggacccggagaagatcgtaagcggagcgggacatgacgcccagatgctcggcagaacctttccggcctgcatgctttttgtgccgagccgtggcgggatcagccactcgccgcttgaattcacacccgcacatcagcttgaaaccggcgtccttacgctggcgaatgtattacataaacttgcttattaacgtaaagggggaatcggcgtgccgaccagaaaagaattgtgcattccgcaaagaacgataatgacaccgggaccgacagaagctgaaccgagagtgctgagggcgatgggcgctccgatcctcggccagtttgacccggcatttaccggtatcatgaacgaaacgatgcaaatgctccgtgaattgtttcaaacggaaaaccgctgggcctatccgattgacggcacatcaagagcggggattgaggctgttctcgcaagtgtgatagaacctggcgacagcgtgctcgttccgatatacggacgcttcggacacctgctgactgaaatcgccgagcggtacggagcggacgttcatacgatcgagtgtgaatggggaacggtcttccggcctgaagagattatcggcgagatgaaaaagatttccccgaaaatcgtcgctatggtgcacggagaaacatcaacggggcggattcatccgctgaaagaaatcggggaagcgtgccgcgcccaagatgcactctttatcgtggatgccgtggccacgattggcggatgcgccgtaaaaacggatgaatggaagattgacgcagtcatcgggggaacgcaaaaatgcctatcggtcccttccggaatggcgccgattacttataatgaccggacggccgctgtcattgccgcgcgtaaaaaggtagaacggggcattgcgacagcagctgacggtaaaatgctgtccggtcatcggccggttacgagcaactattttgatctgagccagctcgaagattattggagtgaaagaaggctgaatcaccatacagaagcgacagcaatgctttatgcgctgcgggagggtgtgcgccttgttctggaagaaggacttgaagaacggttccgcaggcatcagcgccatgaaaaagcgcttacggcgggacttgcagcaatgggccttgatttattcggcgatccggaggcgaagctgcctgtcgtcacatgtgtgaagattccgccggaagcagacggcgaatcgataaggagtatgcttttgtctcaattcggaattgaaatcgccagttcgttcggtccgctgcaggggaaaatttggagaatcggaacgatgggctacagctgcagaaaggaaaatgtgctgtttgtgctggccggacttgaagcggttctgatcagacacggagttgcagttaaagccggggaagcgctgcaggcggcccttaacatatatgatctgccggctgaaaccggtatgctgtcatgagatatgaaaacgagattgaaatcatctggacttttttcccttttccccgttatactgaatggtataaaaaatgacaaatatggaatgatcatctgtttgtctggggagaaggtaagaaatcatggcgtacatggggcgattgtcaattttaatgctgaatatgtttattgcgatgcttgggatcggattgattattccgattatgcccgcatatattaccgaattcggagcgacggggagcacgatgggtctgcttgttgcggcggcggggcttacacagcttttatttgcgcctattgccggggaaataaccgacaaatacggacggcggaaactgattattttcggcattgccgcctttgccgtgtcacaattgatcttcgcctttgccggaagcctgtggcaattgttcgcatcccgccttttgggcggaatgggcgcggcgtttttaatgccgtcaatgttcgcttacattgcggatattacgaccgaggaagaacgcgggaaaggaatggggctgttcagcgcggcgatgacgctcggtgtcgtcatcgggcccggtgtcggcggttatttggttcattacggcatgtctgtgccgttcatcgtgtccgcaagtctcgcctgcttttcaacggtgctttcatttttctttctgcccgaaacgctggggcgtgaaaagcagctggaagcccgggcaaaaacggaaaaacgtgagcatctgtttaagcaaatgtcacgcgcgctcaaatcgccgttcgcgtttatgctgattctggtttttgtgctgaacttcggaattatgaactttgaatccgttttcggcctttacgttgaccataaacacggatttaaagcctctgatattgcctttattattacggctgcgggtctcatcggcgtatttgtgcaggcggtcggcgtcagttatctcgtccgcaggttcggggaaaagcgcgtcattaacgtgacgttgatcggggctgctgcaggacttgtgtggtgccggtttgcgggttcatattgggccgtttttgccgcggcaatctttttcctgacgctgacatcgctgctccggccggccgttaatacgatgctgtcgaagctcgccggtgaccagcaggggtttgccggcgggatgaacacctcattcatcagcttagcgaatatcgccgggccgtcggccgccggttttctctttgatgtaaatatggaatttccgtatatgctgggagcggccattctcgccatcagttttctggccgcgcttggctggggcaaaaagacacagacccggccgttcacgcagcaaggataagaatcaaaagcctccgggtatccggaggctttttgctgattgtcgtttattctgcggctgtctgcatctctgaaattgcagagatgcgcatagagggaaaatcatatagcaaaaacagttgttccgtatgctcaagcatggcgcgaatggaaaccggaacaggtgtagataaagtaaaaccagctttatcgcttgacgagtctgatgaatttgatctgccggaagttgatcaaaaaagaaggcagtcaggcaggcagggacaacattgagcggcgtaaatgctgagaaggaaaaagcagggttttggaacttgctgtttcgtatgcagggggagagcattctgataaaacgggtcattgaaataatacgaactgttcagtagggggcgattggtgacaacaaggagaggttatcttataaaacctctcccggaagatgttgtgatggttctcctgcatgaattttgcagattaaaacccgcaattaggccaacacacaattatgcaagagacaatcatctaaaaaggatgtcggtaagtacaatatggtgtacggaaaaggagttgaaaatgttgtattattacccgtcattccatttgtatcagcggcaagaatttaattattatccatgggcccatcaattgactcattcagggggctccccctatgtttccgcgcgccctcctttttataattccccatgttacagagagtgcataagaagcggagcggatagttatttctgctgctatatctgcggtttctgttaaaaagaaagacttatagaagtaagtgatctttccaggatgacagtgagaccattatccagacagccattagccaacacacgaagctttattacggttcacggaggggaagcgcccctcctttttcagaaattttataaaatccccttgcgcggcctgtcagaagcggtttttggtcttgatgtgttcgactgttggtgttgacgaagaattcaagataccaggaagcagcgaaacctgtatgtatccgcgagacacaaagctttccgccgctgagcgggttcattgtcactgcgttctgtctcctgtagtagataacgagattttggggctgtcagttgaggaaaaataaaaaattcaaaacgtcgcaatcgtttaattaaaaagaagagatagaatctatctcttcggattattactgaactacaaaatggtatcgggttttccaagtggaggaatcatcatagaattcaatccaggcttctcctttagcgactgcaaatacctgaatggttttgtagtcagtacctaaagctctccatgtcacagcaggagggttataacccgtaggattaaaggaaatgcgattaccagaagtagaataattccttatctctcctacttttaaattgacgcgggtttcagactgagattgaaacaaattcttattcactttagtagagggaccggcggctgatgctgaagagttaaaaaaaggcgcgaaaacgaatgaaacaattgcaagtgataacaaagcatttttagctagtttcaacgtaaaacctccttttggtatttataggataacagtaacacttaatggaaatataacaatgaagaaattgttaaatattctttgaaatgagtgaacacatgccaagtgaattgataaatgcaaacatcatacatgtttcttacgtagataaggctgctaatcaaaagcggtttttttatgaaatcagaaaaggaaaagcagcatgactttcagggcggcgtggggaagtggttgagtcttgtgtcgctccccgctgattttcaaatgaatggcgaaaccatcaaaaaagggtcatgggtgcttgtgacaaaggttccgaggcagtttaggatgaaatcaaaaagggtgagattatcggttgcatcctgaatatcgaaaaagcctgatgatatcaatggcagcattttttgagggtttagctgaatgaatcccccttaaataggatgcgggagaacacccgcatcctggtctatggctaaattttaaccgatcagccgctgcattctcagcgcgagccgcaggcgcatcgtcgtctccggatcttttaagcttttgccgagcagttcctcgcatttttctaaacgatagatcaccgtatttcgatggacgtacaggcgcttagccgtttctgaaatctggcagtgggtttccaggtaaacagacagtgtatgaagcaggctctggtcctccttttgccggtcggccaggctttggagggtggcttcgtaaaactttttcacatcttccgccggaagcaggccgagcaactccggcacgtctttggcatgatagatttgaataaactccgcgcttctggacaaatgcccggatgaaatggcgtctgaagcttcagtaaaagcgtcagggacatcgatcagcttttggcatatgtttgagatgccgaaggagacagtccgtttaaactgcgtccggacctgtttctgaaactgctccaaaaagctgatgacagacgcgtgcatttcattccagctgtctgtcgcttcaattaaaagaataccgacatttcctttaataaagagatgagggggaaacggaaaggatgacagctccccttcaagcagatcaaatacatgatcggaaacgagctgattttcggtaaagctgatcgttttctcatttcggtcgagttttccgcaaatgcacatgtatttctgatcccagcggagccggaattctttggcacggcttttgatttcttcatggccggtaaacgagcggtcgatgaaattgctgaaaaattcattgcgcgcccgtctgccgaattgtttgacggcattttctttcagcagttcaaaggaaatgacgttggccgcctgttcaattgtcaaaatcatgcctttatcagcggtctgcaccagctccggaatcaccagataaccgcagtttttttcaacattcagaatcggcaggacagaatacacctttctgtcggagagcatggaaaagcaggtgaaataaggaccggaaagggaataacagatgtttttcaataaagacgtgtcaatgggtatgctgtgggacgatgataagagttttgtatgctgatccaaaagcagcacgggaagccggagaatgtctgagagcttcttaagcagggattgcagccctttgccgctcatgatgtggtttgtaaattttttatgggcgtaaatggcctgctgcagctcatttgaacgcatatcaagaatatggctcaatgtagcattgacgatatctcccagcctgatgtcttccggcagctcaataatcggaaattcataccggtcggcaagctctgcggcatctttcggaatgacattaagatagcgcttcgttttgatccccagtcccgcgcatccccgttttgccatgaggcggattaaatctttcaacagctgcgggcggtccttcaagtggtaagccgtcgtgacgagcaattcgtttttatgtaaaaaatcagcgatgtccggcgcatccatcatgttgacgtgctgcacctccctccagccgccggatctgcctgcgattaatgcggcccgctcataagcgggaatcttcatcacatcataaatattcatcagtcaatctcctttcaggttctaaagacaaccattggttaatatgaataaaagtcatcaaaaattatagcggttttgctgatgtattacgatcatagtagcagtaaactggcaatcatagacgcatgttgtgataaaaactgacagaaaatcgtcatccttacagggaggaagataaaatggcctatgacgtaattgtaaagggtgcgaaagctgtgcgaaaaggcgggacagagcgggccgatatcgccgtcaaggacgggaaaattgcattgatcgagcccggcattgacgaaaacgcggaacaagtggtgcaggcagacggcatgtatgtgtttccgggcgcggtcgattgtcacgtgcatttcaatgaacccggacgcgaagaatgggaaggcattgaaaccggctcaaacatgcttgctgccggcggctgtacggcttattttgacatgccgcttaactgcattccttcgacggtaactgctgaaaacctgctggcaaaggcggaaatcgccgaacggaagtcagcggttgattttgcgctttggggcggtttgatgcccgggtataccgaacatatccggccgatggcagaagcgggggcaatcgggtttaaagcgtttctgtctaaatcgggaacggatgaatttcaatcagccgatgaacggactcttttaaagggaatgaaggaaatcgcggcgtgcggcaggattttggccctgcacgcagaaagcgacgccctcacccgattccttgaagccgagtacgcgctccaagggaaaattgatgcccgcgcttacgcttcctcccgtccggaagaagccgaatgcgaggctgtgcagcgggcgattgaatatgcaagagcgacgggatgcgcgcttcattttgtacatatcagcacgaaacgggccgtgctctccattcagcaggcgaaaaaagacggattggatgtcaccgttgaaacgtgtccgcactacttattattcagctttgaagacttcctcaaaaaaggggcggctgccaaatgcgctccgccgctccgctcagaggctgataaagaggaattgatcggggttttggctgaagacctgattgatatggtgtcttcggatcattctccctgtcatccggctttgaaacgcgaggataatatgttcctgtcgtggggcgggatcagcggaggccaatttacgcttctcggcatgattcaattagcgatcgatcatgggattccgtttgaacatgtggcccgatggacggccgaagcacctgccaagcgtttcggtttaacgaataaaggccggcttgaagaaggatttgacgctgattttgccattgtccggccggaaccttttaccgtcacaaaagaaacgatgttttccaaacataagcaaagcctgtatgaaggccgcacctttccataccgaattgctgcgacctacagcaaggggtgctgtgtgtatcaggatggcggtcgtaagcagagcgggtctttcggaacattcctgaagccttgtgaaataaaaaagccgattctctgatgagaatcggctttttttgtcgtttggaaagcgggtctcgtggtatctttttataaaaaggagtaaaacacattgtatgatcaaatcttgaacatattaacggcatcctggtcgcgcaagaccagtacaaaatggacggaagattgcccggccacaggccagtgcggcgtgacggctttagtcatccaagatgtttacggcggtgacattctcaaaacaaaaaccggcacaagctggcatttttataatcgaatagacggggagatatatgatttcacgagcggtcagttttcagagccgatcgtctatcagcatattctttcttccagagatgaggcattttcggacaccaatgaacatcagtaccgttacctgcaaagtgcattcagaaaaaacatggaaacggaaagagaaaaacacctgtgataaactagaatgagaggtgaaggattgtgatttatatcggactgacggggtggggggatcatgacagcatctatccgcctaaaacagcgggcccgcaaaaactgcaggcgtattcctcccattttcccatcgttgagctggacgcgagcttttacgcgatacagcccgcccgcaataacgaaagatgggtcaaagagacgccggaatcttttcaatttgtcattaaggcatttcaaggaatgacgggccatcagcgcggtgatattccctttgaatcgaaggaagaaatgtttgaggcgtttaagctgtcattatcgccgtatatagagcatggaaagcttgccatggtgctgttccaattcccgccgtggtttgactgcaagaaagaaaacgtcgcatatttaagatggtgcaggaagcagatgggcgatatcccgtgcgcgcttgaattccgcaaccgatcttggttttccccgccattttacgaacagacgctttcctttatgaaggaggaaggctggattcacagcatatgtgacgagccgcaaatcggcgagggcagcattccgaccgtcctgaaagcaacggatgaagaaaaaacgcttgtccgttttcatggacggaacaagcagggctggatcaaacctgacggcggacaaaactggcgtgaggtcagatatttataccgctataacaaacaggagctcaaagattggaaaaacaatcttcaggagctgaaaaagcagtcgcgcaatctgtatgtgctcttcaacaataactcaggcggagacgccgccgataacgggcttgagatgcttgaaatgttagatatctcatataccgggcttgctccgaagcagctcgacctattcagctagaaaagaggtttcaagacacatgtcttatcttattttgattatattgggatttatcgcgggaacggtcggcagcctgatcgggcttgggggaggaattatcatcgtgccggcgatgctctatttaagcacgatgaccccgtttttccatgacgtaacaccgcagactgccatcggcacgtcccttttggtgattatttttacgggcctgtcatcaactctggcctatatgaaatataaaaccgttgactacaaaagcggactgatcttttttatcggttccggcccgggaagcatcatcggcgcgtatttgtctaaactttttaatgcgcatacgttttccgtctggttcggactttttatgattttgatttctattacattaatgctgaaggcgaaagcaaaaccggtcaataaagcgcataaaggcatgatccggacatatgaggatgaaacgggtgagctttatacatattcgtaccgtatttttaccggtatcgccattgcctttttcgtcggtttattgggcggtcttttcggcatcggcggcggctctcttatggttccggccatgatgctgttatttttgttcccgccgaaagtggctgtggcgacgtcaatgctcatcattttcttatcctccgtgacgggttccgtgtcacatatcgcagagggccatgtcaattggctgtatgcgctgtgcctcgttccgggcgcgtggttcggcgggaaaatgggcgcgtgggtcaataagcgggtgcagacgaaaacgatcgtgcttttcatgcgggtcgtcttgattttgatcggctgtgaattgatttatcaagggatattcagctaaaaggtaggagagatggtatgttagagaaactccgtttatatcatacgaatgatttgcacagccatttcgaaaattggccgaaaatcgtacattatattgagcagaagagaaaagagcatgaaaaaaacggggaggaaacactcgtattcgacatcggcgatcatatggaccgatttcaaatgataacggaagcgaccttcggcaaagcgaatgtcgacttgttaaaccggcttgagatcaatgcggctgccgtcgggaataatgaaggaattacgctgcctcacgatgagctggcgggtttatatactcatgccgcgtttcccgtcattgtgtccaacctgtttgacgcggacggacagcggccggaatgggccgagccctacgtgatcaaaacgctgaaaaacgggatgaccgccggcatactcggggtcacggtgccgtattatcccgtctatcagaaactcggctggacggtgacggatgcggaaaaaagcattcaagaatcacttgacgatatcaagggcaaagcggacatcatcattctgctttctcatttaggcctgatcgatgaccgggccgcagcggaaaaatttcccgacatcgatgtcattcttgaatcacatacgcaccaccttcttgaggacggacaggatataaacggcgtattgcttgcatgtgcggagaaatacgggaactatgtcggctgtgtcgagctgacgatagaaagtgaatcacgaaccattgtcagcaaacaggcatctgtacagaaaatggctgattggcacggggaatctgaagatacggcggcttttctgaaagagaaagaacgggaagcggaaaacctgctctccgtacaagtcgccaatctgaatgaagaagccggcgtgaagtggtttgaggaatcgccgctcccgcttctattagccgaagcgctgaaaagctggtgcggctgtgaagtcagcatggtgaattcaggcgtcattttggggcctttacagaaggggcctgtcacaaaacttgacttgcaccgcatctgccctcatccgatcaatccggtcgccgttcgtctttcaggcagggaactccgggaaacaatcagccaggccgcctcggaacaaatggagcagctgcggattaaaggcctcggcttccgcggggaagtgatgggcaggatggtatatgccggagcggaggcagaggccggcatccttgaagacggtgtgacgcatctcctcaatgtgaaagtgaacggagaagaggtggatccggagcggatatactcggttgccgttctcgacatgtttacactcggaaagctgttcccttacatccgcgattcaaaagaaaaacaatattttatgccggagtttttaagggatctgctcgcctggaagctcgcgcggcaagcgtaatgtcaaatatccgccggccgttccatctcacccgaatgaaggtaagcgggactttttaagagcaaaaataaaatactatgtcccctcttacaagcatacattgtgatatgtaaggggggatttttcttgcctagataccggagcgctcttcgcaagagagggcctttgccttttcgatatgtgcttcttctgtcgtttgctttttttatcatatcgacggtcatcagcctctggatgatcaactcctcaatcaaaccggtgctgatgaacataggagaaatggaaaccaaacgggtggcgacagaggtcattacggaatccattgaagaatacatgtctcacagcgacaatgtgaaagatatggtcgatatgaaaacggatgaaaacggaaaagtcacaacgatggattttaatacacaaatggtcaacagcatgaaggcgaaagtgacaaagcagcttcaggctcatttgaaggaagcggagtcgaacaataagcagcatgaaacggaaaaaggcgcgaaaacggccgatgaaattatgattaacatccctttagggcaggtcacgggaaacagcgttctcggaaatctggggccgaaaatccccgtgcgctttaacctgatcggtgatgcgttaactgatgtgaaaacaaaaataaagccgtacggcattaacaatgccctgatcgatatcagtatttttgtggaaattaaagtgaaggtcattattccgtttgccagtaagacatcagtcgtcacaaataatattccggtctccattaaagcgattcaaggagaggtgccgcagttttataacggaagcggcggatcaggtgtgacgccttctgtccagctgccgagtgaaaaacagaagaaagataaataaaaacacacagccgcaatctttcctggcggctgtgtgtttactttttcctgcggatttcttttcgctcccatgcccttaaatggggatacgggtcaaaagaccattccgatctgccgttatctttatacatcccgtagtgaagatgcggcggaaattttcccgcggtgcccggcggtccgtatccggaactgccgacagagccgatcacctctccgggtttgacgatctggcctttatgcacaccttttgcaaagccgttcaggtgagcgaagtagtgatacgtgttattgatatccctgatgccgattctccagccgccgaaacggttccagcccttcatttcaacaataccgtagcaggtcgatctgacggggagtccgtaatgagcgaacagatccgttccttcgtgaatccggcgcccgccgaaaccccgtgcggcgccccatgtgctgcggtagctgtaatccgtcttcacgggaagcggaaaagcgtgctctccgagatcaaggcggccgaacgttttaaacagtgtcatgaattcggtgataatgccgaccgtctgatcacggcggtaataattccagaggccgatgcggatatggtcaagatccgttccgaatcccgctaaatactgtgcaaatgtataaaggatatcctcatcattgctgacctcggcttttccgtcgccgtcgccgtccaggccgatcccgtcaaatactttaatgctgaggggcgcctcgtccttaggatttggattttcaggcccgctccacaaatgatccggaatataaatgctgatgattcccgctttttccggcagatcctttcggttcgagcggacattttcttcatattgatcaaccgccgcaagcacataccaaggaatctgcgtgactgcttcggctttgcggtacaactgcatccgttcaccgtaaacaggagccgattgttctttcccgcttgcagccggacagaaaactgataaaaggagaagagcagataacagaactttcacaacatgatctcctttcaggattaatacaactagtttgcggcaacaatccgagaaaatgtaagtaattctcttcccttgtcgagaaatttttcctatgttaaagtgactattgaatagaaatctgcaagttttatatccatcgtgaaatagaaatttttcgcacacgaacatgaataaagggataatggagatgatggggaaatggcaaagaaagacgagcatctgagaaagccggaatggctcaaaataaagctgaacacgaatgaaaactatacgggtctgaaaaaattaatgcgtgaaaataatctgcataccgtatgtgaagaagcaaaatgcccgaacatccatgaatgctgggctgtcagacgtacggcgacgttcatgattctcggttccgtctgtacgagagcatgccgcttctgcgctgtcaaaacgggtctgccgactgagctggatctgcaggaaccggaacgcgtagctgattcggttgcactgatgaacttaaagcacgccgtcatcacggccgtggcgcgtgatgatcagaaagacggcggagcaggcgtctttgcggaaacggtccgggcgatccgcagaaaaagcccgttcacgacaattgaagtgctgccatccgatatgggcggaaattacgacaacctgaaaacattaatggatacccgtcctgatattctgaaccacaacattgaaaccgtccgccgcctgacaccgagagtccgggcccgcgcaacatatgaccgttctttggaattcttgcgccgtgcgaaagaaatgcagcctgacatcccgacgaaatcaagcattatgatcggtctcggcgaaacgaaggaagaaattattgaagtgatggacgacctgcttgcgaacaatgtcgacatcatggcgatcggccaatacctgcagccgtcgaaaaaacatttaaaagtccaaaaatattatcatccggacgaatttgccgaactgaaagaaatcgcgatgcaaaaaggcttcagccactgtgaagcaggcccgcttgtccgttcttcctatcatgcggatgaacaagtgaacgaagcgtctaaaaaacgccaggcccaagcataagataagccgaaaaaacccaaaacgccgcaggttttgggttttttgtgatggagccgtctgtgcagggaaaaagtcattcttgaataaggatcgtcagaaccgctacactggatataaaaggggaaaatttttccgtccgtccgaaccgtctcattttgcaattgatggacagaagtcaatgaattatgatagtaaagagtgataaaagaggtgaagacatgattcttattcaaaatgccgagtttgaactcgtacacgattttaaaaacggctttaatgaagaagcgttcaaagcccgctattcggacatattaaataaatatgattacattgtgggagactggggatacagtcagctgcggctcaaaggcttctttgatgaccagaatcaaaaagcaacctttgaaacgaaaatcagcacattggacgaatacatttacgaatactgcaatttcggctgcgcgtattttgttttaaaacgaatcagaaaataattgatgcagaaggggatgctgtcacgtgtattttgttgacagaaataatatcgaacaaacactccgtttttttgagacccagctggcgctgtttgacagcacgcctgcatggcagagcgaaatcgaaaaaagggcgcttgagcggatcagccatcttatgatcgaatgcattctcgatgtcggaaatgatatgattgacggctttatcatgcgcgatccggggagttatgacgacatcatggatattctgacggatgaaaaggtggtagctgaggatgaagcgaataagctcaagcagctgatctcttccagaaagcggcttgttcaggaatatcagcaagccgatcatcaggagctgtttacgctgatcacgtcaaacagggacgtgctgaaagcctttccggcccgtgtaagaacctacctggaaacagaattagggcctgtttccgcatttaaataacaacgagtgagaaaatccacaggagtgttgagtatgaaggattataaaggatatttgatagatttggacggcacaatgtacaacgggacggaaaaaatcgaagaagcgtgtgaattcgtgagaacgcttaaagcgcgcggcattccgtatttattcgtgacgaacaattcttcccggacgccgaagcaggtggcggacaagctgatgagctttgacattccggcaactgaagagcaggtcttcacgacgagcatggcgactgcgcagcatatcgcccagcagaaaaaagacgcgtcggtgtatgtgatcggcgaagaaggcatccgccaggccattgaagaaaacgggctgagcttcggagaagaaaacgcggactttgtcgttgtgggaatcgaccgcggcattacatatgaaaagttggcaacgggatgccttgcgatcagaaacggcgcccggttcatttcaacaaacggcgacgtcgccattccgactgaaagagggcttttaccagggaacggttcgctcacatccgttttgacggtgtcaacgggcgttgagcctgtctttatcggcaagcctgaatccattattatggaacaggcgatgcgtgtgctcggaacggatatttccgaaacactcatggtcggcgataactatgcaacggatattatggccggcctcaatgcgggcatggatacgctgctggttcataccggagtgacaaagcgtgagcatatggcagattacgaccggaagccgacatatgcgattgactctttaaccgaatggattgaacatctataaaaaagggacggccatgacggccgtccttattctgtatttctggcgctgtgggcaagccggcttgaagccgctgctgcgattgcgccgacgatatcatcaagaaacgtatggcattcccccgtagatttatcatttaaccgcccgagaatgccgggtttttctttgtcaatgtagccgtaattcgtaaagccgattgagccgtatatattcacgatagagaaggcgagcacctcgtcaaccccatacaggctttcatcaatcgccagaatggtctgaagcggttcagacagttttttttgttcggcgagcacatctaattctattcccgttaaaatggcgttttgcacctcgcgttttgcgatgacacggtccacattgagcctgcatacttccatcgtcaaatcaggatgatattttttctgaaggaaatacaccagctcggcaatatcgtccgtctcaaccccccgttcttttaaacgcgctctggcgacagcttccacctgattcagttgttccttttctgacatttgcttcacccaatctttttttactagtttatacaacacccttccgatgtgtacgatgtttctccacttgattcaaaggattacaatatgtattcataattccgccggcgtatgactacgatgtgaatagctctaatttttcaggcaggtgattatgatgaaaagcatcattaaagaaaagtacggcatccacgtcagacagctttccgtttatcagaaataccaatgcttccagacgcctaattccttctttcttattattcccgtttccgggttttcgcaatcagagctgacggagctttactacatgagtcagtatttacaagaacaaagtgacccatacgtttcagtgtttatctttacgaaggaaggagaactgacctttgaggacgaaggcaaaacgtatgcgctcttaaaagcgccgatccccgtcgcaaaccggtcgttctctgtcggaggggagcttgccgaatttcacagaaaagggcggggttttccgtacgaagtgaaagaagcgggcaggatcggccaatggaaggacttatggggaaaacgggtggatcagctggaatcattctggatgcagaaaattcatatgtctccgcttgaaccgttcgaaaagaaaatgatcgaagcatttccttattattcaggcttagcggaaaatgcgattcaatatttagtggatacggagctggatgacaatcccggcgcagaagactcggggacaatctgccatcagcggatggaacgggatacctggtcggaggaatcattgatccgcattccgggcgattgggtattcgaccatgccgcccgtgatattgcggaatatatgcgcagcacatatttgtatcatcgtgacgacttgcttaacgaagggtttttgtttttgcaggaatatgagcaagttacgccgttatcctccttttccaagcgcctgttttacagccgcctgctgtttccgcttcatttctttgagacggtggagagttattacatttctcatgattctgaaaaacagttttacgaagagcagcttgactacattcttgccgactgcacccgctatgaacagtttttacagacatgtcacgacatgatgaatgtcaggtcggcgcaggtttttgtcccgcctgtggcgtggctcggaaaaggaatcagttcgtaagaaaatataacgtaaaaatatttagaaaatagggaatcttgtcatatcaatgtgttaagcgttttcatggccgtagaaacaatattcagccgcttgtcaaaacaaatgcgggcttatataatatttgtaacttaaatgtctgtgaagggttaacaattgtccttttctagtggacaaaaggaagaaaggtggagtttctctttggaagcgattcgtattggactgttaggactgggaaccgtgggaagcggagtcgtcaaaattatacaagatcatcaggataagcttatgcaccaggtcggctgtccggtgacgattaaaaaagtgctggttaaagatattgataaaaaacgagacgcagacctgccgaaagaagtgctgacgacagaagtctatgatgtgatcgatgaccctgaggtcgacgtgattattgaagtcatcggcggtgtcgaacagacgaagcaatatcttcttgatgccttgaaagcgaaaaaacatgttgtgaccgcaaataaagatctgatcgccgtatacgggtcagagcttttagccgccgcaaaggaaaatggctgtgacttgtattatgaagcgagtgtcgccggcggaatcccgattttacgcacgctcgaagaaggcctttcctctgaccggatcacaaaaatgatgggaatcgtcaacggaacgacgaacttcatcttaacgaaaatgattaaagaaaaaagcccgtatgaagaagtgctgaaggaagcgcaggatctcggattcgcggaagcggacccgaccgccgatgtagaaggactcgatgccgcacgcaagatggcgattttagcccgtctcggcttctctatgaacgtcgatctggacgatgtcaaggtaaaaggaatttcccggattacggatgaagacatcagcttcagcaaacggctcggctatacgatgaagctgatcggcatcgcccagcgtgatgacaataaaatcgaagtcagcgttcagccgacactgctcccggatcatcatccgctctctgccgtgcataacgagtttaatgccgtttacgtgtacggagaagccgtaggcgaaacgatgttttacggccccggagccggaagcatgccgactgcgacatcagtcgtttccgatctggtcgcggtcatgaaaaacatgcgtctcggcgtaaacggaaacagctttgtcgccccgcagtttgaaagaaatctgaagcagccgtctgatatctacgcccagcagtttttaagaattcatgtcaaagaccaggtgggctctttttcaaaaatcacatcggccttctcagagcgcggcgtcagctttgaaaaaattctgcagctgccgataaaaggacatgacgatctcgcggaaatcgtcatcgtcacgcatcatacatcggaagaagatttcagtgacattctgcaaaacttaaatgatctagaagttgtacaagaagtaaaaagcacatatcgtgtagaagggaacggttggagctaatgtggaaaggactcatccatcaatataaagaatttctgccggtgacggatcggacgccggccctgacattgcatgaaggcaacacgccgctgattcacctcccgaagctttctgaaaagctcggaattgaactgcatgtgaaaacagaaggcgttaatccgacgggatcttttaaagaccgcggcatggtcatggcggtcgccaaagcgaaagaagaaggcaatgataccatcatgtgcgcctcaacaggcaacacatccgctgcggctgccgcatacgcggcgagagccggcatgaaatgcatcgtcatcatcccggacgggaaaatcgccttcggaaagcttgcgcaggccgtcatgtacggtgcggaaatcatcgcgattgacggaaactttgacgacgcgctggccatcgtccggtcgatttgtgaaaaatcaccgattgcattagtgaattcagtaaacccttaccggattgaagggcaaaaaacagcggcctttgaagtatgcgaacagctcggcgaagcgccggacattctggcgatcccggtaggaaatgccgggaatatcacggcctactggaaagggttcaaagaatatcatgagaaaaacggcaccggacttccgaagatgcgcggttttgaagcggaaggttctgcggctatcgtccgcggcgaagtcattaaaaatccagaaaccgttgcgacggcaatccggatcgggaatcctgccagctgggacaaagccgtgctcgctgcggaagaatcagccggaaaaattgatgaagtcacagatggagaaatccttcacgcttatcagctgattgcccgtgaagaaggcgtatttgccgagccgggctcctgtgcatccatcgccggcgttttgaaacaggtgaaatccggtgaaattccaaaaggaagcaaggttgtcgcagttttgaccggaaacggcctgaaagatccgaatacggctgtggacgtatctgacataaaaccgatcacgctgccgacagatgaggacagtattctggaatacttaaatggagcggcgcgtgtatgaatgaggcggagatgctgttttccattacggttccgggaagcaccgccaacttaggacctgggtttgattccatcggaatggcgctcagcagatatttgaagctttcggttttccgaaacgatgaatggcagttctcggcggaaaccgaaactgtcgcgggcatccctcaaggaacggacaacctcatctaccaagtcgccaaacggacggctgaccgctatcagaaagagctgccgcccgcccatgtcaaagtttggagtgacatcccccttgcgcggggtctcggaagcagcgcggccgctatcgtcgccgccattgagcttgcggatgagttatgcggcctgcagctgtcggaaagcgacaagctgcacttagccagtcttgaagaggggcaccctgataatgccgctgcttcccttgcaggagggcttgtaatcggccttcacgaagaagatgaaacacatatcgtgcgtgttgccgaagcggatatcgatgttgtggcagtgattccgttttacgaagttctgaccagggacgcaagagacgtgctcccgaaagagctgccgtaccgacgcgccgttaaagcaagcgccgtcagcaaccttctcgttgctgcgatcatgtcaaatgactgggcgctcgccgggaaaatgatgagaaaagacatcctccatcagccgtaccgcgccatgcttgttcctgagctttcaaaggtggaacacgcggccgaaatgaaaggcgcttacggaacggcgctgagcggagcgggaccgacgattcttgtcctgattgaaaaaggaaagggagaagagctgagaaaacagctttctgagcatttccctcactgtgagattgcggcgcttaccgtcccgtcagaaggaagcgtaattgaacggaatcctttagagcaggtgaaaagtgtataatgataaaaaagcgttcttcccatcagagaaggacgctttctttttctggagaaggatttttatttagggaagcgaaataaaaaagaaaaggaggagatacgattgaaaaaactcataaccgaggaggacattgcgtcactcgtatccgtgacagacccgcaatatgcccctgacggcagaagagccgcttacgtccggacaacagtcaatcataagcgtgattcctattcctcagccattatggtatatgacacagaatccggcatctcaaacccgtggactttcggggacgataaaaatacaagtccgcggtggtcgcctgacggtcggcgcctcgcctttgtttctgacagggaggacggcatccctcagctgtacatcatcgacgctgccggcggagaggcggaacaggctgccgatattccttggggcgtatcagatccgatatgggcgcccgacggcagatccgtgcttgtgtccgtcagtctgacatcagcggagcgcgccgatgagaaagaaaaaaagaagcatgacgagtatgagccggttgagattcaatcattaacatataaacgtgacgggaagggcctgctgaacggaagccggacacagcttgtgctgattcatcttgaaacgggggagattcagcagctgacagatcatgaagctgatcattatggcgcggccttttcaccggatggcaggcagcttgcgtttaccgccaatttatgcgagccgggtgacgccggaaagccgagcgatgtctatctgatgaatctggcggacggaagcctgaagcagattacgccgcaccgcggttctttcggttcctgcgtgttttcaccggacggttcttatatcgcgatgctgggccatgagaatgaatttcgcaatgcgactttagagaaagcgtggctgtacgacgtgaaaactgagcggctgtcctgcctgaccgacatgctggatgttcatttgagcgatgcgctgattgcggattcaatcataggaggagtgacgccccggccggtatggacaaacgacgggcagggcttttacgttctcgggagcgagcagggaagcaccggtatttattatatctcgattgacggcctcgtatatccgatccgattagaagaagagtacgtgaacggttttgcttttcatcctgatcagaaaagctgtatcgctgtcattgccaaacccgcacagccttccgagctttacagcatttcacttgaaaatggggaagagaggcaattgacattttacaatgatcggtttatagaggagcgtatcatatccgtgccggaaaagctgcaatatgaaacaaaggacgggctgacggtaaacggctggtttttaaagccttccgtttttgaagaggatcaaacatatcccctcattctatacatacacggcgggcctcacatgatgtacggccatacgtattttcacgaattccaagtgctggccgcacaaggatatgctgtcgtgtatgtcaacccgagaggaagccacggctacggacaggattttgtcaatcgtgtcaggggtgattacggaggcggagattaccgtgatgtcatgcaggcggtggatgaagccgttcaggcgtatccgtttttagacagcggccgtctcggtgtgacgggcggaagctacggagggtttatgacgaattggattgtcggacagacaggccgttttaaagcagccgtcacgcagcgctccatttcaaattggttcagcttccacggtgtcagcgatatcggcttcttttttaccgactggcagctcggacatgatttgtttgaggaagcggataagctttgggatcgttctcctgtaaaatatgcatcccgcgtttcgacgccgcttttgatcctgcacggtgagcgagatgaccgctgtccgatagagcaggcggagcagctctttaccgcgttgaagaaactgaacaaaacgacgtcgttcatccgatttccgaaagctacgcatgagctgtcgagaagcggccatcccgaacagcggatgaaacgcatccgttatatttgttcatggtttgatgactatttgtaaaaataaaaaaaccaggctgtcatgcagcctggttttatgattaaaatacttgttctacttcaacgacacccggtacttcttcaagaagggcgcgttcaattccggctttcagcgtaatcgttgaacttgggcagctgccgcatgcgccaaggaggcgaagctttacaatgccttcgtctacatcaacaagctcacagtcaccgccgtcacgaagcagaaacggacgtaatttatccaatacttcctgtacttgctctttcatttcaacctcagtcatgagattcgctcctttcatatacataaaaccattatattcacagtaacggtaaaaatctaatgtttggtttgcaaagctgctttctccattatagcatatttaaacttgaacataaaaaccgttttttatacaaaagctgccccgtcctttgtatactggtgtaaaggggatgatatacatgacaaagccggttacgctcagtgtttacggcgctgaaacgctttgcgcaagctgcgtgaatatgccgagcgccaaagatacgtttgaatggctggaggcggcgctgaaacggaaatacccggagcagccttttaacatgcggtatattgatattgaggcaccgcctcagcaaaaggagacagaagagcttgcggagcgcatcaagaacgatgaatttttctatccgctcgtgctggtggaggatgtcattgtgggggaagggaatccgcatttaaaagatatatatgaagaaatggaaaagcgcggctatgtggcgggctcttaaaaatggccgctgatcgcaatcagcggcttttttcttatcagccgttatgatgcttgtacatccataaaaggcctgattttaataaacggggcacacgcccgatgagcggacggtcgttgacaagaccgaagcccgctttttttccgagtgaaccgaggacgcctttcagcttaaattgcggcattgtttccggcagctcttcattgttccagcgtttcaggaggatctgcacaatttgttccgcctgcgcttcagccagctgggcgctcggcgcatgcggcaggctcgcgcaatcaccgacgacgtaaacatgctcatcgcccggaagattgtgatgcggtgttaaaacgatgcggccttgcgggtctttttcagcgtccagttctctgacggctttattcggctgaattcccgccgtccacacgatggcatcggccggtattccttcatcatgattataaacgatgccgtcttccacttttgtaatattcgcattattgataatggtgacgccgtgttcttcaaaccatttctgaacgtacttgctgagtcttttcggaaagcttgataaaatcaggtcgccccggtcaaataacataatcttcagatcgtcacggctctctcttaattcactggcaagctccacgccgcttaatcccgctccgacgatagcgacagatgcattggcgccgaggttgttcagcttttgataggcttcgcgtgactgatcaatggtctgaatgctgtaagtatgttccggcgcgccgggcacgttatgatacttatcctcacagcccagtccgatcaccgcgtcatcgtaagaaatcggttcgcggtcatgaaacagaacctgtttgtttttcgtgtcgatggaagccacctcaccgtattgaacatccagattcggatgctcaggaaaagacaccctgatatgatgatcagaaatcgtgccggctgcgagcgcataatattctgtttttaagcagtgatacgggtttctgtcaatcagcgtgatggatacatctgacggaagctggttcggcagtaagcggtgcagcacccgcatgtttccgtaacccccgccgatcaagaccaattttttcataatgattccccttttgcccgaaaaatatggtagtcaatattgttacaaaataacgaactatgtaaaataacatctagaattatatcgaatttgatctaaaaccacaataatagttttaaaataacctacaaattgaccagaaaacacgcaatagtaaaacctttaacctgaattaatatgttacgataacattgagcgtgaaaccggatctttgacgaatagaggaaattccgttaggataaggtacatatgtgaggtgaaaccgcatgaatccgatgattgaattctgtgtcagcaatttagcgcgcggttcccaggaagcacttgagatcttagagaaggatccgaacttggacgtgcttgagtacggctgtttaagctactgcggaaaatgcatggagtccctgttcgccctggttaacggcgaagtggtcacggggggcacgcctgctgagttggttgacaacatatatacattcatagaagaaaatccgatgttttaatcagaggctccgaacggggtctcttttttattgcgcccgggttttggcaaaataaaaaatttgtagacagcaaaaataaatattgttatcttaataaagactttttttaaataaaattttagaggtggattcattgaatatcgtttgggggctgctcggggcagttgctatattagccattgcttttttgttatcagagaagaaaagcaaaattaacctgcgaaccgtcattgtgggtttatgtttacaaatggccttcggattcatcgtattaaagtgggacgccggccgggccgtatttttatggttctcaagccgtgtgcagcttctcattgattatgcgaacgaaggcatcagctttatttttggcccgctgttaaaagtgggcagcagcccggctttcgcgctgagcgttctgccggtcattatctttttctcagcgctgattgccgttttgtatcacttgaaaatcatgcagctcatctttcgcgtcatcggaggcggactgtcaaaacttcttgggacaagcagaacggaatcgcttgcggcggctgcgaatatttttgtcggacagtctgaatcaccgcttgccattaaaccgctgattgcgggattgacccgttccgagctgtttacgattatgacgagcggcctttcggctgtagcgggttcgacgcttttcggttacgccctgttaggcattccgattgaatacctgctggcggccagctttatggcggctcccgccggtctcgtgttcggaaaaatgttaatacctgaaacagaaaaaacgcagacgataaaaggcgattttaatatggacgaagaaggcgaaggcgccgctaatgtgattgatgcagcggcaaaaggcgcatccacgggccttcagattgctctgaatgtcggcgccatgcttcttgcgtttgtcgcgctcatcgccgtagtgaacggaattctcggcggaatcggcggctggttcggtttcaaacatattacattagaatccattctcggttacgtgttttcaccgatcgcatttgtaatcggcgttccttggcatgaggcgctcggagcgggaagctatatcggacagaaacttgtgctgaatgagtttgtcgcttattcaaacttcggtccgcatattgcggacttttctaaaaaaacgtctacgattatcagctttgcgctgtgcggatttgccaacttctcttcgattgcgattatgctcggcacactgggcggtttggccccaagccgccgttcggacattgcgcgcctcggattaagagcggttattgcgggaacactcgcaaaccttctcagcgcggcgattgccggcatgtttatttagtaaacgataaaagctccctgcatatgcagggagcttttatgtatgaaaaacgggggatatttgtattgtgtccgaggggaagagcttttatactaagtaaaagaaaaaaagttggaggccgatatgaattcattccgttttaccaagatgcacggtcttggaaacagttatatatatgtaaatcaatttgaagaacagctgccggaagaacggctggctgagattgccgttaaagtgtccagcattcacacgggcatcggctctgacggaatgatcctcatctgtccgtcagaaaaagcgccggtcaaaatgcggatttttaataatgacggctcagaagggaaaaattgcggcaacggccttcgctgtgtggcaaagtatgcatacgaacataagctgacagaagaaacgtcctttttcattgagacgctttcaggccttgtgaaagcagatattacggaagaaaacgggattgtgcgtgaagtcgccgtcgatatgggcgaaccgcgcctcaccaaaaaagagctgccgatgctcggcaatgaagatgaacggacgatcgatgaaacctttgtttttggagaaacggagctttccggaacagccgtatcaatgggaaacccccatattgtttttccggttgcggatattaatcaagcgcctcttacaacgctcggtcccgtcattgaaaaagacccgagatttccggaaggcgtcaatgtcgaatttgtggaaaccgtcagcgccgatgaacttcatttccgcgtatgggaacgcggctccggcattacacaggcttgcggaacgggcgcctgtgcggcggctgttgcatccgtattgaacggtgtttccgaacgaaaccgggatatcaccgttcatttagcggggggcgatcttgtgattaattggcaggacaacgggcacgtgctgatgacgggacccgccgaaaccgtatgcagcggcgtctattatttgtaaacagctcgtttgagaaatacgctcctcaaggtttataatagatatcagcatccgtttttaaaaaaggaggtctacttatgagtgttccagtaactattactgaagcagcggctttgcatataaaagatatgatgaaagagcatgaagaagaaaacgcgtttctccgtgtgggcgtaaaaggcggcggctgcagcggcctgtcttacggaatgggatttgagcacgaaaaaggcgaaaaagacagcatgtttgaacagcacgggatcaccgttttggttgacagcgaaagccttgatattatgaccggcacgatcattgacttcaaacagtccatgatgggcggcggtttcaccattgacaacccgaatgccatcgcttcctgcggctgcggatcttctttccgcacggccaaaaacgccggtacgccggaagagtgctaagggtcagcccgccattctcaggatgaaaaaataggacgcctttcttttcgatggcgcttgcaccattgttaaaaaaggcgtttatctgtttaataaaagcaaaacccgctcaacagaagcgggttttgctttttcaaagaggttattcaattgtatgtttcatcgcattgtacatatttgccgtatgttcatcggctttatcccgtgacatgcgcagccgttccgctgaagaaccgtaaccgatttctagtttgccctctttcagtcctttaaaaatcccatcagcgaattcatccagcggttctccttgagtatgcagccctgctccgcctaaatctgtatttaccgccggaggcgcaacttcaatcacttctacagatgaatcagaaagctgatgtctcagactcattgtaaatgaatgaagcgccgctttcgttgctgaatagatcggtgcaatagcaagcggtgtaaaagccaatcccgaagagacgttaatgacagccgcatcttcttttccggcaaaaaacggagcgaacagcatagacaggtggaagggagcttcaatgttcgttgtgatttctttattaaaatagtcccaattgtccttcgcatccgctttcagcacatgaaaacgatgttgaatccccgcgttgtttactaacacattcacttccggataattttctttcacccaatcaaacagtgatacacgttcagatggaatgctcaaatcactgacataggtaataagatccgggaatgtttcctttgctttttgaagagcgtgcttacgccgtccggtcacgatgactttatttcccgcttttaaaaaccgttctgcgaaagccaatcctattccggcatttccgcctgtaatcagtattgtatttcccgtcagtttcatattaactcctcttttccgattgtttttacttcaacaaacttacgtctcttgaacagagcttttgatataagcctttgtcattgacgacatttcatccagtactgaccgcttgtgtctcctcatcatgtcaagccggagtttaataggactctctccttcaattacccaatcaatatattgcttaaagcctttgatggtcatgcgggtattttttaaacaaatcacgatatcaaggagcggcatttgatctgctgaaaataaccgccggctggcttcatcacgttcaatcagcggcagcagtccctttttttcataataacgtaacgttgattctgtcatattacactttgctgctgcttcacgaattgaacaacatgtcttcgaaagacctccaacagtattttttccttgtcactgggtgatgatacgacttaaaccatgttttaagtcaataaaaaaaatgtgatgaattcagacatatgtcacaaaaggaaatgggcagattttcaataggtttaggagtgacggccttcacaaaaatcctcaaatcaacggttcaaatcatactatttgcaaattcggaaaaaaataaagggtatatagaatcaaaaaatctggaagatgtgctcttagtcaacacgttctaaagtcatatttttcgaaaggatattgattttttgataggaataaactaaattgtaaaagtatagaatagttaatttattttgtaagaaaaggatgataatatgataggtcaattgagcaataaaaaaatatttttaagttcttttttcatcattttgatctgttcattactcttccaattcagtatttccgataaagttctgcagtcgtattattcttccgtcggagaaagtacctacgatatcggggagaaaagtgttcgtacgattgtcatgtttctgcaagggtttatgatcttcacaacttttgtggaaattctgataggcggatttctattattcgttgccgcttttattctcggtacaaaaaaaccgaaaaaaatatatttgcttctatatacactgacttctttaatctcggcatttaaaatgttgattctttcagttgttaactacttaacggctgattcctcgcttatatattctgccggcggcaccagcttgagtctgcagctgctggatccatttctgctcatatcaattgcggctctttatgctgccgcaggaaaactgaccgatctcagtaaaggcaagagaatcattttgactggatgttttgttttattaaaactctttactattttctttaattattttatggcggataaaatttagctcgggagagagtcaattaagctgaattttattataaattaaaaaaacagagtagggagatgttatgatgaacttagtaaaatctaataaaaagtctttcattttgtttggcgtggctcttgctgcagcaacattggtttatgcactattattaacgggaactgaattaaacgtggcggcggctcatgcattctcagccaatgctgaattagcttcgactctgggcatctctacagcagcagctaaaaaagcaattgatattattgatgcggcatcaacaattgcttctatcatttctctcatcggtatcgttacaggcgcaggcgcgatttcttatgcaatcgttgcaacagcaaaaacaatgattaagaaatacggcaaaaaatacgcagctgcttggtaaaatcgaccaataaataattgctctttttgtacaagctgcaaaaagagcctctctcccaaatacatatgtaaggattgaaagtatgatagtcaaacaaattgcggctcttatcaaatataataccctgtcatcgtttcgaaaaagaaaggaagattggggcattcctcaactcaacagcaaactgctgtctgccattattatttctctgttatgtttatatctcgttttcctgggatgcggtgttgtattcgggacaaaactgattcagctgcccctcagcgcatgggggcaatttgttttaatcgccgtttcacttgagcagcttttttgggctgccggcttctttaaagaacatcacaatgcctttctgctggatacgcgcaaggtcattcatcaattaaaaaaggtgcgttttttacagctgttttctgtttttgccggccaggcgatcaaaaaaaccattttcgtatggtatctttttgtttttccggtctttttgtttttatcaagcgcaggcatgaccgggtctgcggcgatcatcgtatttttcttgggcttcgtttattttcttctcaatttatttttatctatgctgttttcttatgttgtttatcttcttacaaatatatggagcaaattgttttacttgaaaatcctgaaaggcattttattcagcgtcagcctgctggttccgcttgcagtcgggtatgccgtttatcttctcgtgtttggggagtataccgcaaaggatatttcaagctttacggagtcaccggctttccggaacatcctcatgaatacgccgtatgtatggttagcattccgctcacattccgtgctcgttttcgctgcggtgtttgcggccgccgtccttttaacggcggggatgtttaaactgtggtcggccacgctgaagaaaatggaccttattccttatatgtttttgacaaacgctgattttgcgccaaagctgaaattatatagaaataacaaaatatttcatgccgtttttcaaaaggatctgctgtttttatcgagaattgacgggttttttatcaggaacttcggcagtatgctgtatttgttcatgctgtttttaggtttttgtattccgcttctatcgcatcactttatcgggtattcggcagccgccatcgtgtctgcggcggttatcattgcgaacttttcgtatcagctcgtcggagatgcgctcaaaacagtattatcagttgacggggaaataaaaaatcagcatctgtttcaccggaatatcaaacatgcgtggcagctggtgtttccgaaagtatgtatttataatctcgccgctcttatctattcgttcatcatcaccattttgattacggtgttttttccgtcttccgcggcgctgacgatttacctgtttattgtgtttttatgttcgggttttttatacagtctcgtccagatttcaagcaccgccctgtatcctaagaaaaactgggagcatctgtacgaaattggagaagcggggaaagcaaagacgtataacaacttatacagttctttcattttcattgtgtcgcttcaaatcgctgcgatcacgtcctattttatctataaaaagccggaacttgaaacgatgcttattcattctgcatcaggtatttttgtcctgttcacactattaaactatggagtcatgtttctgtttcttcgcagaatcaatatggcggaaaggtttgcgaacaatgattaaattagtgaatatacaaaaaaactatagtgaaaaacaggtattgaaagatatttcgtttgaggtgaaaaaaggctcaatctatgctttgctggggactaatggagtcgggaaaacaacgactttgaaaatcatttcgggcctgcttaaaccgacttcaggccgcgtcatgattgacggcaaggaactggattcagaagagggggggcaaatatcggctgatatcggttttgtgcccgaccatgcttttttatatgattacttaacgggagtcgaatacttgcgttttacagcggaaatgtttcaagttccgtctcagcggacaaatgattatataaagaatatgttggagacgctgaagctttctcaagacggaaatcagctgattaaaacttattcacatggaatgaaacaaaaattatcaattgcggcagcgctcattcatcagccaaagatattaattcttgacgagccgctgacgggcattgatttaatcagcggtaaaacgatacggacgttattaaaggagtacgtcaagcagggaaatacagtcctgttatcgactcacctgctggagctggcgcattcgctgtgcgatacgatcggtattatacatgaaggcgtttttgcggcggagtatcagtcatccgagcattcattagaagagattgaagaattggctgagcgtatctatacatgatgaaccgcatgttgccggcaatcagaacgtccgccattccgttaaccgcgtcagtgctgtttttttcaggcggtgtgatcgctgcgtttttttccgatcactttgtttcatcagcgtcttacaacggctcgtcaggcgcggttgaactgctgaaaaacaatgcaatcgcttgtctgtttttagccgcgggtttttttacctttgggttgacctcaatcttttatttattcaccaacgggtttattttaagcggctctattatagaaaatctgcatagcggggttcctttttatcagatttttttactgctaattcctcatggtatatttgaagttcctgcgttattattaagtggcgccattggttttaagggcgttgaattggtcatcaggctgtgtttttctaaggaaaaaaagataatggtttcaatgttcaggcatattggaatattggtgctgcttattatttgtctgctgatcgccgctgccgttattgaagcttacatcacaccaatttttaagtaaaaggggcagaaatcatatgagaagtaaattatcattaatcggtgtgccgattgttatgattatcggttatatcatttctttatcctttgagtggctgtttcctgttcttacttttggggtggcaggactatatctctttatatttgctccggtgcaaaataaattcattcgttacatctttttgtttatttttgtgattaatctgttagccagtgcggctctttatttcggtatttaataaaaaaatgacattcaatatgaatgtcatttttttttatcttcgagcggctctgctgcatgttaaaatctgtcgccgttgaaaatagagttttttacgattacatagtcgacattacggatggcttcgagtgtattgccgccggcgtaagagatggaagattgcagatcctgctccatttcaaccagcgtgtcctgcaaagaccctttatgttcgacatgcatttttttgccctcgacgtttttcttttcgcctttttgaaattcagaagcggagccgaaatattctttgtacagctttccgtcgatttcgatcgtttgtcccggtgattcttcgtggccggcgaataatgatccgatcatgaccatagacgcgccgaatcggatggatttcgcgatatcgccgtgcgtgcggatgccgccgtcagcaatgatcggtttgctcgccgcttttgcgcaccagcgaagcgcggctaattgccacccgccggttccgaagccggttttaatttttgtgatgcagactttcccggggccgattcccacttttgtcgcgtcagcgcccgcgcgttccagctcccttacggcttcaggcgtcccgacattccctgcaatgacaaagctttccgggacatgttctttaataaattcaatcatgctgatcacggcattggaatggccgtgcgcgatatcaatggtaatataatccggcaccagctcctgttctttcagctcccggatgaattcatagtcattttccttcacgccgacactgatggaagaaatcagtccgcgcgctttcatatcccggacaaaagccagacgtttttccggctcgaagcggtgcatgatataaaaatacccgttttccgcgagccaggccgcgatgttttcatctataatcgtctgcatgttggccggtacgaccggaagtttaaacgtgtgtccgcccaacgtaactgatgtatcacattcagatcggctttcaacaatgcattttgcaggaatcagctgaatatcttcgtaatcaaatacattttccatatataacacccctaaaagcgaataatatatttaaataaaattaaaatgttcgtctttttataatgtactttgttttgtcaggaatgtcaaatgatttcatgctgcctcatatgcggtcagcttgtcatccatttgcagtttggttatcatagtagtattggttgttgtaagacatttgttacgatagatagatttgcagaagaagggaggggccggtatggaacaaaaacagcccgggcacagcccgaaagcccagaaaattcaggaccggattattttaggcacgatttgggtcgtgtcggcgcttgtcattgcgctcgttgtcggaaccgtcatgaattatatttggatgtttaaataaaaaagagtctgtgccggtatgacacagactcttttttatattatttttcaaacatgcttgtagaatgcagtggctggacgcgcgctttcgggtccatgtaagccttcgcgttgttcacggctgtcggagcttcgccgaaaccgctggcgatcagcttgactttgccttcatatgtgcagatatctccggcggcaaagaagccttcaatattcgtttccatcgtgcttttgacgacgatggaatttttctcgatatcaagaccccagtttttaatcgggccgagagaagaaacaaagccgtagtttacgatcaggtcatcaatttcaatgatttctttacggtcgcctttcacttcttcgagaacgagctgttcgatccggtcttcaccgacaagttcagcgggaacaaacggtgtcagcacgttgactttagaattatgcaggttttcgacactgtgctcatgcgcgcggaatttatcacggcggtggatgatgctgacttctttggcaatcggctcaagcatgagcgcccagtcaacagcggaatcgccgccgcccagaacggcaacgcgtctgcctgcgaattgattgaggtcgtcaatgaagtagtgcaggtttttgccttcatattgttccgctgattccagctcaagctttctcggcttaaatgcgccgtttcccgcggtgataatgaccgtttttgaataatgcgtttctgaattcgtgacaagcttaaacacaccgtccgcctgtttttcaacagattcaacggcctgctctaagcagatggtctgatcgaactttgccatttgctcttttaagttgttcacaagttcctgggcgcggattttcgggaatccggctacatcataaatatatttttcagggtacagcgcgctgagctggccgccaagctgaggcaggctctcgatgattttgacgctcgcctgtctcattcccccgtaaaaagcggtaaacaggccgaccggaccgccgccgatgaccgtaatatcataaacctttgaatcctcttgcataccaaattgcctcctaattgaaaattgttattaattataacatacaatttgaaaggatgacgagtgccgaaaaccgcccggccgcttcattcttgaaaaaaattgcggccgccgctaagatggggacaaattccaatctgttttttcctgaatgttttccgattcttccggatagtatggtgatatgcagacatgtgcggttttctaaaaaattttatatttcatttcataaaatcccgccaataagctgaagctaatacaaatgttgatttgattatgcgtctaacagcaaaaaaaagaaggtggatgtgatggcattgaataaacccaaaatcgtggttttaggtgcaggttatggtggattaatgacagtaacaaggcttccgaagcatatcggggcaaatgacgccgacattactttggtcaataaacacaattatcattatgaaacgacatggatgcatgaagcgagcgcaggaacgctgcatcatgaccgctgcagatatcaaataaaagatgtaatcaatgaatcacgggtcaaatttgtgcaggataccgtaaaagcgatagatgtgcaaaataaaaaggtgacgctttcacaaggggacatcccttatgattatctcgtcatcgggcttggcgccgtccctgaaacattcgggattaaaggtttaaaagaattcgcttttccgatcgcgaatattaatacgtcgcgccagctgaaagaccatattgagctccaatttgcgacatacaatacggaggccgaaaaacgccctgaccgcttaaccatcgttgtcggcggagcgggctttacgggaattgaatttctcggtgaacttgcgaaccgcaagccggagttatgcagatattatgatatagatgaaagtctcgtccggatcgtctgtgtcgaggccgccccgacggttttgccgggatttgatccggagcttgtcgattacgccgttcaataccttgagagcaaaggcgttgaatttaaaatcggcaccgcggttcaagaatgccgcgcagacggtgtcacagtcggcaagaaagatgaagagccggaagaaatcaaatcgcagaccgttgtctgggccgcgggtgtgcgcggacatccgatcgtggaggaagcgggttttgaaaatatgcgcggccgtgtcaaagtcaaccctgatcttcgggcgccgggacatgatgacgtttttattctcggcgacagctcgctctttatcaatgaagagacggaacggccgtacccgccgactgctcagatcgcgatgcagcaaggagaaacggtcgccaaaaatctgggcggtttgataaaaggaggccagcttgaagagttcaagcctgacattaaaggaacggtcgcctccctcggtgagcataacgccgtcggagtcgtatacggcaggaagcttaaaggcacgccggcgtcctttatgaaaaaggtcattgataaccgctcgctctttatgatcggcgggctgggcctgacgctgaaaaaagggaagtttaaattcttctgaaaacccgcagccgcgggttttctcttcttttaaaaaagagcgctataaaaagcatgtaaaagaaaaaaaagaatgtttccgcttacatgagttgttatgttacatattctgacttggtgcttgacaagtaaatatgatatattatcagaaaattaagaaaaagggtgatccgcatgaaaacgacagcaaaaagcacggcggcgtgtccgttctgctcaggtaaagggtattttcaattgcttcttggcggctccgaaacatgtccctcctgccagggaagcggcaaagagagacgctgatttttccagacgttgacttttttaccgcccccgaggtacactgaaagtgctgtagggggtggatgtttgtgattagtttgccggttgtcctgatctcaatcgtactattttttgtactgtttttcggcataggctttctgttgaacatgctgcttagaatgtcgtggattatggctgttgtctatccgattgtatgccttttcattatcagcaataaaaagatgatcagttacgtgcaggcgccgggggaatcctttcaaagcctgtttcagcgcatcatgtcattagcggttgcggatgtcgtgattttggcgggcggactggcgggagccatcatgtcaggcattgccataaaggcgctcagaaaaagaggatatcaaatgttttaaaccgctttcttattcaagaaagctttttttgtgtcacggcgctttttgtatagcacctcaccgagttgggaacaatgactcggaggagagtgatttcagattgacgataatcagacgcgtattcatgatcgtgctctttttgggcgcatgccatgcgacatacttttctataaccggtgttgaagcaaaggatctgacaaattggatgacggaacatcgcggcgccgttttgaaaaacatcggcactccgtttcaatccttacagaatcagccggaaaagaaggcatcaggcagggtaaagccgctggaagaagcttttgactgggaacgctatccgtcacaaaaagtgacggccaccggttataccgccggagcggaatctaccggaaaatctccgggtcatccgcagtacggaattacatattcaggtgtgaaggtcaaacgcgatttatattcaactgttgcggccgatccgtctgttttcccgatcgggacgattctgtttataccgaattacggttacggggttgtcgccgataccggctcaaaaattaaaggcagccgccttgacctctactttgacaccgtcaaggacgtctataacaattggggcaaaaaaacacttgaggtctacattattaaaaaagggaacggcacagtgaccgaggacgaacttgtaaagctgaacgaaacaaagtcgctgcaagtgttcagaaatcaatacaaaacggtaaaagaataaaaacgcttcagcatccgctgaagcgtttttacataaagaaataatctaaaatcaatgtcagcacaataccggtgacgccgccgaagaacacttcaatcggctgatggccgagcagttctttcagtttcttctgtttttctttctcttccgctttctgaaagtccttcgcttcgctgacaaaccgattaaagtcgatgaccagtttattaatgactgtcgcctgttcacccgcatgccgcctgacacctgtagcatcgaacatcgtaatgacggcgaaaatcgcggcgactgcaaacaggggcgagtccagtccctgttccaaagcgattccggttgacagcgcggtgacggcggcggaatgggagctcggcatgccgccggtgctcgtcacaagagaccagtcaagttttttggatacgataaattgaataggcacttttacaacttgggcaaaaataatggcggcaaaactcgccagtaaaggaaaattcataagtacatccatatgcgacatcctttctgtatctgctgattccgatcgtatcgaaaaactgcagaaaacgcccttagtttggtaaaataaaatcaatgaaaaatgttttttcattataccactttacataacaaatacccacataaggagtgtgtactcatgttttatgcatctgatcaactgcggcatcccgaaacactggtcatcggtctttttcaaaaaagcacgctgaacggatttacgaaggaattggatgataaattagacggtcatctgacccagctgttaaaggatggtgatgtgtccgccaaacgcaatcgtgtatcaaaagtataccctccggctgcgaccggtatgaaacgtatttattttatcggcctgggaagagaagcggattattcgtttgaagatacgaaagaatgctttgcacgagtatttcagcagattcatcaagataaaaaacaggaagtatccgtgttgctcgatacattcgtctccggggaagtgcctgccgccgatgccgctcatgcgctttcggaaagctgtctgcttgcggtttatgaggtgcaggattataaacataaatcgaatgagccggatcaggaactgaaatcagtctgcgccgtgaccgaagaagacctgagggaagtgcaggccggcctgaacgtcggcgcggcatacggccaagggacgaattcagcccgcacgcttgtgaatatgccgggtaatatgctgacggccactgatttggcgtcatatgccgctgagcttgcggcaaaatacgatttcgagtgtgaaattttagaaaaagatgaaatggaagagctcggcatgggcgggctgcttgccgttaacaaaggctcatccgaaccgccgaaaatgatcgttctgaagtatcagggcaaagatcagtgggaagacgtcatcggcctggtcggtaaaggaattacctttgatacgggcggatattcaattaagccgaaaaccggcatcgtcggcatgaaaagcgatatgggaggggccgcctcggtattgggcgcaatggaaattatcggcgaactccggcctgaacaaaacgtgctcgccgtcataccgtctacggacaacatgatttcgtccgatgctatgaagccggatgacgtcatcgtttcgctcagcggaaaaaccattgagatcctgaacaccgatgcggaagggcgtctcgtgcttgccgacggcatcacatacgccaagcagcacggagcctctgtccttgtagacgtcgcaacgttaacgggcggtgtcattgtcgccttaggtaacgaaatgacgggcgccatgaccaatcacgccgcgttttatgaacaggtggcggaatcggcgaaagaatccggcgagccgatctggcagcttccgattacagaaaaggataaaaaacgggtgagaaacagtcagatggctgatttgaacaattctccgggaagagaaggccacgcgattatggcgggggcattccttggtgaattcgcggaaaacacgccgtgggttcatctcgatattgcgggaaccgcgacggcgaataaagcgacatgcttcggccctgccggcgcaacaggcgtcatggcaaggacgttggctgttttgactgagcggtttacgcccgaaagataacagcatcccgctgccttgatgcagcgggttttttgatttccaaaatctttagttgactaaagcgcagaatgtatgttaactttaattatctactacattagcaaactaaaggatttttggagggactcatcaatgaatgctgttgttgtcgcagtattgcttatgctcgtcttaagcctgctgcgtgtcaatattattatagctttaatgatcggcgcgcttgccggcgggctgaccggcggcttaggcctcggagagacggtgaaggcttttacggacggtctcggcggaaatgccaccgtcgcggtcagctacgcgctgctcggagcatttgccgcggcgctgacgaagacggggcttcccgatgcaatggtggaagcgtctgtcaaactaatcggaaaaaaggaagattcgcggaaaaaagcactgtcaaaagtgttaatcgtactggttattttaatcatatcctgtttctcgcaaaacgtggtgcccgttcacattgcgtttattcctgtattgattccgccgcttttaaaaatatttaacgaacttgaaatagaccgcaggctgatcgcgtgtgtgatgacattcggactgactgcgccgtatatcgttctgcctgtcggattcggacagattttccaggggatgctgagagataatatggcgtcagccggtttaaaggtgccgctcagtgatattccgtatgctttaatcatcccgacggccgggatggtagtcggtttaattttatccgtcatcgtcttccggaaaccgaagaaatatgagacgaaggagattgccggactgtcgtcttctccttatacgaaaaaaagcattgccatcgccctgatctccattgccgtgtcgcttgccgttcagctctatctgtcacaagtgctcggagtggaaggtatgatcatgggcgcgcttgccggcttgtttacgctgtttatcagcggagtcatgaagcgcaatgaagcggataagctgatcacggacggcatgattctgatggcttttatcgggtttgtcatgcttgttgcggccggtttttcaaatgtattgaacaaaacgggcgatgtggcttccttggtcaaagcatcaacaggctttatcggtcacagtcaatcattaggcgcgctcctgatgctggtggtcggtttattaatcacgatgggaatcggatcatcatttgcaaccgtacccgtcattacgaccatatttgtcccgctgtgcgctcagctcggattcagcccgatggcgacgatcgccgtaatcggagcggccgccgcggtcggtgatgcgggttctcctgcaagtgacagtacgctcgggccgacgtcaggcctcagcgccgacggacagcaccaccacatttgggatacgtgcgtaccgacatttattttctataacattccgcttgtgatattcggctggattgccgcgcttgtcctgtaaaaaaaggctcccggaaaggggagcctttttgtatgctgagaacatcttacgccggatttctgctgaaccccgtcgctttatgaatagacctgtatacggcaggcgcgattgatgccaataacagtgctaaaacgatatcttttatgaaaaaccatatcatgtaaaaccaggccattccgtagctgatcggagcatgaagccataatttcagcgcaatatacgtataggtcgtgccaatgatataaatgacggcggtaccgatcaaagaggcccatgcataatgcaggcggccgggtttttttgttttttccagcagccatccggctgcaaatgccgccgggatgtaagcgagaataaacccgccgctctttccgataaacggcgcaaagcctgctgagaattgagcgaaaacaggcgcccccgcgagtccggccaatgcgtataccgtcattgcaatggctgcccgtctggcgccgagaagcatcgcggctaacagacaaaagaaaggctgcagcgataacggaattcccgcaacttgcaaaaaaggagccattgatgtaatgttggcgccgacggccatcagggcggcaaacatgccgatcagcgccatatcgcccgcgcgaaggttgcgttgtgtcatttgtttttcccccttacacttgtaccagattagcgtaatcgaagggtgattgattgtcaacaaagatttaatacaggtttactaaatggagggagccatatgtttttcgggaaaacgaaacaaacaaaacagtcggaacggattccgccaaatcaaaatgtcacaacgaagtttcccgtgcttcacgccggaaatgttccttattatgaagatatgtcaaaatggaatctgcaagtgtacgggcttgttgaccgtcctatgctgttaagctttaaagatatcaaagcctttccggaagccgaagtgaaaaatgatattcattgcgtcacgggctggtcccgtcttgataatatctggcagggaatacgcgccaaagacatcgctgagaaagcgggtgtgcacaaagaagcgggattcgtcattctgcacgctgaagagggctggacggccaacctgccgctttctgattttacgcgggaaacatccctgctggcatatgcgcataacggcgagccgttaacgccagagcacggctatccgctcagaggcgttttcccccatctttatttctggaaaagcgcaaaatggctgcgcggcattcagtttacaaaggaaaaccaccccggcttttgggagaaaaacggctaccatatgaggggagatccatggaagaatgagcgctttacatgggattaagcccctatccctatatagttcttaggtaccttattaaaataaggtgctttttttatatcaaaaatccattgactttgtttggcaaaaaacctattatttgaggtgtcttttgatattgaaaatcattatcaatgaggatagataaagtaattgccacaaaggggatgaacacataatggacggaaaacaaataaaccgggggttcgcgccggccggccgatacgcggttccgggcacagaagtaagagaaatgcgctcaaaaggaggccgtacgtatcgtatctttgtctcttttcctcaggaagaaccgcctgcctccggcttccccgtcatctacctgcttgatgcaaattccgtgttcggtacaatggccgaagctttgcgggtgcaaagccggcggcctgaaaaaacaggcgttgttccggcggtgattgtcggaatcggctacccgacagatcagccgttttccgccgaacggcacagtgattttacgatgccgctttctgaatcagaactgccggtgcatccgcgcggcgcggcatggcccgaacagggaggggcggaagcgtttctggagtttatagaagaagaagtaaagcccgcgatggagcgggattatccgatcgacagagacaggcagacgattttcggccattcgctgggcggtctttttgtgctgcaagtgcttttgacgaggccggacatgttccagacctatgttgcgggaagtccgtcaattcattggaacaagcgttttattcaggaaaacgcagaacgtttgtcagaccggctctctgcggaaaatcttcaagtcagtgtattgctggctgcgggagaaattgaaaaaacacataaaagcagaatcccgcagcacgcagaggcgctgtactctttattatccggatttgaagatgatggagtccgtgctgaatacagcgagtttgaaggagagggccatatttctgtcctgcccgttttaatcagcagagccctgcgtttctgcctgaatccgggagggccgcataccccgtattctcccacatgagaaaaaacaggcccttcgaactaaatgcggctgattctaattttctaattgactgcgtgttttgatttggatatgattgtcttgaatcataattgataatgataatcattatcaatatagaaagggaatgataatatggacgcattgggaatgaaagggaaaacggccgttgtcaccggcgccgctcaaggcatcggagaagcaacagcgcttgcccttgctgaacaaggcgtaaatgtggcagctatagatacaaatgaagacctgcttcccgggctaactgacagacttcggcaaaaaggcgtgcaggcgcaggggtttgccgcagatgtatctgacagtgcggctgtcaatgatatcatcgctgccgttgaacgtgacatggggcctattgaaatattggcgaacgttgcgggcgtgctgcggccgggtccggtgcaatcccttagtgatgaagattgggatcaaacattttctgttaatacgaccggcgtatttcatgtatcgcgggctgtaagccggtacatgattgagcgtcaaaaaggcgccatcgttacggtcggttcgaatgcagccggcgttccgcgtgcttccatggcggcttatgcggcgtcaaaagcggctgccgccatgtttacgaaatgcctcggactggagcttgcggcccatcatatccgctgcaacatcgtatctccgggttcaacggaaaccgacatgcagcgggcgctgtggcgggatgaaaacggagcacaggacgttatcagaggttcgcttgatacatataaaacgggaattccgcttcaaaagctggcaaagccttctgatattgcaaatgccgttttgtttctggcctctgaacaggcaagccatatcacgatgcatgatttatgcgtggatggcggcgctactttaggcgtttgatttaacgagaaggagggacaaacatgacaaatcaacatgtattgacggaagtgtctgcaaaagaggtgctggacgcttacaagcccggagcgttctttttagcttccccgaaaaggacgctccttgcagaaggtgtgtttgcaaaagtgccggatgcagacgcggagaatcagctggattcactgcctgaacgcgtaagacagacgcttcttgaggcaaagcaagccggcatcaaacatccgattgcggccggcgccattccttttgacggcagaaaagcttcccggctttttgtaccgaagaatgtccatacggcaggcccgctttcgtttgcggaatcttccgcagaaaagccgcaatccaatacatatgacatccgtcccgttccggagcctgagggctttatgagcggtgtggaacaaggcgtattcaacattacggacggcccgctcagcaaaatcgtgctgtcaaggacgcttcatctgaccgctgaaaaggatatcgacattcctcaggccgtcaagcatttggcgcagcacaacccgcgcggctatacattcgcttcggatgtgacgggaacgtcagaaacaagaaaaacgcttttcggcgcaagtcctgaactgctgctgtccaaaaacggaacatcgattctgtccaatccgctggcaggttccagacctcgcagcacagatcccgccgaggatcagagaagagcggaagaactgctgcaatcagcaaaagatctgcatgaacatgccgtagtcgtggccgccgtggccgccgccctaaaaccgttctgccgtgtgcttgatgtgccggaaaaaccgtcactcattaaaactgaggcgatgtggcacctgtccaccgaggtaaagggagagcttagtgatccgtcaacgacatcgcttgagctggccatcgctcttcatccgacgcccgctgtatgcggaacgccgacggatgcggcgagagaagcgattcaggatatagagccgtttgaccgcaatttctacacgggaatggcgggctggtgtgatgctgaaggtgacggagaatggattatcgcacttcgctgcgccgaagcggaaacaaggtctctccggctctttgcgggtgccgggattgtcgccggatcaaagccgcaggatgaactggacgagacatcggcgaaattccgcaccatgctccgggcgatggggctttaccaagatgagttgtaaaaaaggagggaacggatcgtgctgactggatttacgccatggccggaagaatgggctgaaaaataccgaaaagacggctgctggaagggtgagacgttcggaggaatgctgaaagagcgcgcggctttatacggaaatcaaactgccgtgacgtgtaaagatgtacattggacctacaaagaattagatgaaagggccgatcgtttagcggcggggctgcataagctcggaattcaaaaggaagaccgcgttgtcgttcagctgccgaatatcgctgagttttttgaagtgattttcgcgctgttccgactcggagcactgcccgttttcgcgctgccttctcatagaagcagtgagattacgtatttctgcgagtttgcagaggcgaaagcatacatcattcctgatacgcattcaggttttgattacagggcgcttgccagacaggtgaaagacaaacttccggatttggcgcatgtcattgtggccggcgaagctgaagagtttcaggaactgagcagcctgcatagagagcctgttcagctggaagaggtaagcccggcggaagtcgcttttttacagctttcaggaggcagtacggggctgtccaagctgattccgcgaacacacgacgattacatatacagtttgcgcctcagcgcggaaatatgcggcttggatcatcacagcgtttatttggccgctctgccgacagcgcataattatccgctcagctcgccgggtgtgctgggaactttatatgccggaggccgtgttgttctgtcaccgacgccgagtccggatgactgcttcccgttaattgaaaaagaacgtgtcacgattacagcgctcgtcccgccgcttgcgatggtgtggatggacgcatccggttcgcgaagtgatgatttatcaagccttcaagtgctgcaggtgggaggcgccaaattcagtgctgaggcggcccgccgcgtaaagagcgctttcggatgcacccttcagcaggttttcggaatggcggaaggattggtgaattatacgagactggatgatcctgaagagatcattgtcaatacgcaaggcagaccgatgtcaccttttgatgaggtaagggttttagacgatgacgggcgggatgtcgcccccggagaagcgggacatttgtttacacgcggcccttacacgattcgcgggtattataaagcgcctgaacataatgaaagatcattcacagccgacggattttatcagaccggcgatatcgtcaaactgacggcggacggctatatcatcgttgaaggacgtgcgaaagatcaaatcaatcggggcggcgaaaagattgccgctgaagaggtggaaaatcaccttctggcccatcctgccgttcatgatgcggccatggtttcaatgccggatgattttctcggagagcggtcctgtgtgttcgtcattccgaaaggagaagcgccgaaaccgggagagctgaaagcgtttttacgggagcgcgggctggcggcatataaaattcccgaccgggttgaatttatcgcttctttcccgaaaaccggcgtcggcaaggtcagcaaaaaggaccttcgcgaaacgatcgcccaaaaattgaagcctgctgaaatcaaacaatcttaaaaaaggaagtgtttacattggctataccgtcaattcccgcatatgcgctgccgacagcgtcagatatgcctgaaaataaagtatcgtggacgctgaacccgaaacgcgcggtgcttctgatccatgacatgcagaattatttcgtcgatgcttttgagaaagggaaggctccgatcacggaggcggctcagaatatcaagaaaataaaagagcaatgcaaagcgctcggcattccggtggtgtacaccgcgcagccgggcagccaagacccggcggaccgcgcgctgctgacggatttttggggaccggggctgaaaagcgggccttatgaagaaaaggtcattccggagcttgccccggatgatcaggacattgtcctcacaaagtggagatacagcgcgtttaaacggacgaatctccttgacatcatgcgtgaaagcggcagagaccagctcatgattacgggaatttatgcacacatcggctgtctcgtcacagcctgtgaagcatttatggatgatatccaaagcttctttatcggagacgccgttgctgatttttcttcagaaaaacataagatggccatcgaatatgcgtctcagcgctgcgcttacacggctttgacaaacgaagtgctggagctgctgggcggcgcgccggtttctgaaggagaagggaagacttccgccgtattgacaaaagaccgggtgcgggaacaaattgcggcgattcttcaagaatcaccgtctgatattccggatcatgaagacctgctggacagaggccttgattccgtcagaatcatgagccttgtcgaacaatggcgccgtgacggagctgaagtgacgtttgttgaactggcggagaacccgacgcttgaagagtggtggagacttctttcttcccgatctcaaaaagtcttgccgaacgcagattatttataaagggagagaatagaatgcatgatacacaacagctgcctctgacaggcgcacaggccggtatctggtttgcgcagcagcttgatcctgataatgcgatttacaatacaggcgagtatgttgagataaacggcgcgatcgatgtgaacatatttaaaacagctctcgaacgtgtgctgacggaagccgtgtcattacacgcccgcttcgaagagggagcagacgggccgaagcagatcatcaatcctccatttgaagctgcgatcgatgtcatagatgtgagttcagaagctgatccgaagcaggccgcactcagactcatgcagacagatttggctgagcccgttgatatggcggccgggcctttgttccgcgacattttatttcaggcgggaccggaacgctttttctggtatcagcgcattcaccacattgcgatagacggctacggtttttcactgctggcacggcgtacggcgcaaatatacaccgcaatacgggaaggacgtccggataacgggcgctccttcggctctttggaggaactggtaaaagaagatcaagaataccgcgcgtctgatcaattcctgaaagatcgggaattttggatggagaaatttgcggatgaacctgatgtcgtcagtttggcagaaagagcgccgagaacgtcaacaagctttcggagaagcacggcttatctttctgaaacggctttgcagcatgtaaaagcaattccgaactggcatgaagccgtcacagctgcagcggcggtatatgtccaccggatgacaaacgcaggggatatcgtgctcggtttaccgatgatgggacggatcggctcgatttcactgaatattccgagtatggtcatgaatcttctgcctttacggctttctctccgcccggatatgaattttcatgaggccgtcagccaagtggcaaaagaaatccgaaacatccggcgccatcagaaataccgccatgaagacatgcgccgcgatcttaaattgctcggagaaaaccgcaggctgttcggcccgcaagtcaatgtgatgccgtttgactacgctcttgatttcgcaggagcgccaggcaccgtccataacttatcagccgggcccgttgatgatttgtcaattaacgtttacgacagagcggacggaagcggaatgcgtgtggactttgatgcgaatccggaagtgtacagcgccgaagatattgaaaaccatcaaaaacgattcctgcttctgctggaatccgctgtgaaagaccagacacaaaaaatcggcacactcaaccttctgcctgaaagtgaacgtctctgcgtactggaaagctggaatgacacgcgcaaggccgagaagcagaaaagtctgccggagctgttttacgaacaggccgtaaaaacaccggaccggccggcaatcatcaccgaaaacgaagagctcagctatgccgaattgaacaagcgcgcgaaccagcttgccggcatgctaaaggaaaaggggctcggaccggaacaatttgccgctttgctgcttccgcggtcacaggagttggccgtgagcatgctggccgttttgaaaacgggagccgcatacctgccgcttgatcctgattttccttctgagcggatcacatacatgctcaaagatgcacaccctgcatgcctgattacaacgatggaattatccggccgcatgccggaagacagtgatgcaaaaaggatcattctcgatgacccggatacggtaaaaaccgttgccgctcaaaatgctgactgttccgatcaggcggaatgttcgcctttgcaccccgcttatgtcatatatacatcgggttcaacgggcaaaccgaaaggcgtagtcgtgacattaaaaagcgtaagcaatttcctcttatccatgcgggaaatgttcccgctcggcgcacaagaccgcctgcttgccgttacgactgcggcgtttgatatttccggacttgagctcttccttccgctcatcagcggggcggggtgcgtcatcgcacgtaaagagacgattcaggaaccgcgggcgcttgcgaacatgattcactcatacggtatttcaatcatgcaggcaacgccgacattgtggcattcattagtcaccaatgaacctgattccctccgggcgctgcaggtgcttgtcggaggtgaggcgcttccgaacgcgcttatgcatgctctgcttgaatcaggctgtacggtgacgaatctgtacgggccgactgaaacaacaatctggtcggccgcacagccgcttgcaaaagaccatacaggggcgcctccgatcggaaagccgatttggaacacgcgggtatacgtgctggacgccgcattgcagccagtcccgccgggaattgcgggcgagctttatatagcgggcgaggggcttgccagaggttattataaccgtcctgatttaacagctgaaagatttattgccgatccgtacgggcccgcgggcgcgaggatgtaccggacgggagatctcgtgcgctggcgtgaggacggctcgcttgattatatcagcagagccgatcaccaaattaaaatccgcgggttccggatagaattaggagaaattgagtcagtgctgtcgaaatacccgggtatttcgcaggccgctgttattgtccgtgaagaccagccgggagataagcgcctggcggcttatgctgtcgcggatcagccccttgatatcggcggacttcgtgaatatatgggcgaaagcctgccggattatatggtgccgggcgcgtttgtacagctgaaagaattgccgctgacgccgaataagaagctcgatcgcagcgctctgcctgcacctgatttttcagctgtcctgtctgacagagggccgcggacgccgcaggaagaaatattatgcgatctgtttgccgaggttctcggtctcgcgcgggtcggaattgatgacgggttctttgaattgggcggacattcgctcttagccggacgcctgatgagccggatccgggagacgatgggcgcagagcttggcatcggacgtctgtttgataccccgaccgttgccgggctcgccgcacagcttgacaccgcaaagagtgcgcggcctaagctcaagccgtttgaccggccggagcacatcccgctgtcatttgcgcagctgcgtctttggtttctctactgtcttgaagggccgagcccgacttacaacattccggtgattgtccgcatgtcaggcaagcttgaccaatcagcgctgaaacacgccttttacgatgttgtcagccgtcatgaaagcctgcgcaccgtttttccggaaaataagggatcatctcatcagcttattttacctgctgaagaagcccgccctgtgtttacagtgacacgtgcagacaaaaacgagctccaagacatgcttgccgctgcggcaagatatcggtttgatctcgctaaagagccggccgtccgggctgagctgtttgatcttggtgacggcgaatatacgctgatggttctcctgcatcacatcgcaggcgacggctggtccttgaatccgctcatgcgtgacttatccatagcctatatcgcccggcaaacaggtgaaaaagcagaatgggcgccgctggcggttcaatatgcggattatgcgctttggcagcagcagcttttaggcagcgcgtctgattctgagagcttaattgcgcgccagctggatttctggaagaaaacgcttgaaaatgtaccggatcagctggagctgccgtctgattttccgcgtcccgctgaatcaagctacaggggcggcgtcattccggtcaacatcggccaagagcttcatgcccgtcttctctcacttgccagaaatcagcgcgtaagcctgtttatggtgcttcaatcagggctttccgcactgctgacccggctcggggcgggaaccgatattccgatcggcagtccgatagccggccgcagtgatgacgcattaggagaccttgtgggtatgttcattaatacactcgtactgagaaccgatacctctggcgatccgagcttttgtgagcttcttgaaagggtcagggaaatgaatctcgcagcatatgaacatcaggacgtgccgtttgaacgtctcgtggaagaattgaatccggttcgctcccggtcaagacatccgctgttccaagtgatgctcgcattccaaaatacgcctgaccctgtactcagtcttcctgatatggaaacaagcctgcaaatcagcagtgtcggatcgtccaaatttgatttgacattggaattggctgaacagcgccatgatgacggcacgcctgccggtattgaaggcctgctggagttcagtacggacttattcagaaaagaaacggctgaagcacttgccggacgcctgcttcttctgctcgaagatgccgtatcacatccggataaaccgatcggaagcttaaccattctttctgatgaagagcgccggaagcttttgccggttaaacgggcaaaacagcatattcagcctcggcagacactgcctgaactgtttgaaatacaggccgccgcaaaatcggatgaaacggcggcagtatttgaagagagcggactcacttatcaagagctgaataaaagagccaatcagctcgcgcacatgatgattgcccgcggcgtcggcccggagcagtttgtcgcactggcgctgccgcgttctttagatatgattgtcgggctgttagccgtcctgaagacgggggcagcgtatttgccgcttgatcctgattatcccgcggaccgcatcgcttttatgttacatgatgccaagcctgtatttatgctcaccaaccgtgaaggcgcaagtaagctctctggcgaaaacggcatgccggccttcatcctggatgatccgcagaataaggaaacacttcggcaatatgccgtcacgaaccctgagaatgccgaccggattcgtccgctgagaccgcttcacccggcctatgtcatttacacgtcgggatcaacaggtgtgccgaaaggtgtcatcattccgcacagcaatgttatccggctgtttgagtcgacgcggcattggtatcactttaattctgatgatgtatggacgatgtttcactcctacgcttttgatttctctgtctgggaaatatgggggccgctgctccacggcggacgtctcgtcgtcgtgccgcatgacatcagcagatccccggaagcgtttctgcatcttctcgtgaaagagcgagtgaccgtacttaaccaaacgccgtcagcgttttaccagctgatgcatgcggaaaaagaacacaaagagctggggcatcagctcgcactcagatatatcatcttcggcggcgaggcgcttgagctgagccggcttgaggattggtacagccgccacgcggacaatcagccggtgctcgtgaatatgtacggcattacggaaacgacggtgcacgtcagttaccttgaattagacaaaaacattgccgaactgagagcaaacagcctcatcggctgcggcattcctgatctgaacgtatatgtgcttgatgaccggctggagcctgtgcctccggggatcacgggcgaaatgtatgttgccggagggggcgtggcacgaggctacttagggcggcaaagcctgaccgccgaacgctttgtggctgatccgtacggcccgccgggaacgagaatgtaccggacgggggatttagcccgcctgcggacggacggttctcttgattatatgggcagggcggaccaccagattaaaatccgcggcttccggattgaattgggggaaatcgaagcggttctcgtcaaacatccggatgtcgaggatgccgccgcagtcgtccgtgaagaccggccgggagataaacggctggccgcctaccttgtccgatctgccggcagcaccttggacacgggggacatgcgccggtttgccgaagaaagcctgccggattacatgattccatcagcttttgtccaaatgaatgaactgccgctgacaccgaatggaaagcttgaccgaaaagcgctccctgcgcctgacttccaaacggaggtcaccggccggggaccgagaacgccgcaggaagaaatgctgtgtgagctgttcgcagaggtgcttcatctgccgcgtgtcggtattgatgacagattttttgatttaggcggccattctttgcttgcggttcatttaatgagccgtattcgggaagcgatgggagccgagctcagtatcggaacactatttgaagctcctacggtggcaagccttgctgaaagacttgagtcaggaacgggcacaagcgcgcttgatgttcttcttccgctcagaacggcaggagaagaaacaccgttgttctgtgtccatccggccggcggtctcagctggtgttatgccgggctgatgtcttctttagaagctgattatccgatatacggcttacaggcgagaggcatcggaaaaaaagaaccgcttccgcaaagcttagatgacatggcggctgattatattgaaaaaatccgcaccgtgcagccgaaagggccgtaccgtctgctcggctggtctctcggagggaatgtcattcaggccatggcgacacaattacagagccggggcgaagaggtttcgcttttggtgatgcttgacgcgtatccgaatcattttctgccgataaaaaatgcgcctgatgacgaggaagccgtcattgcgctgcttgccctgggagggtacgacccggacagcctcggggatcagccgcttgattttgacaccgcgctgaccattctccgccgtgagggaagcgcattagccagcctggacgagtcagtgatgatgaatctgaaagacacgtacgtaaattctgtcgggctgttaggaacatacaagccaaagccgttccacggagatgtgctgttcttcagatccacgattattccggagtggtttgacccgatcgagccggatacttggaaaccgtatattactgggaaaatcgagcggtatgacttagactgccgccataaagatatgtgccagccgggcccgcttgccgacatcggcgcgattctggcagagaaattaaacggacggcgtacagtccggtaaagaaaggaaagagatgatatgacaaatccatttgaacgggaagacggttcataccatgtgctcgtcaatgctgaaggccagtactcactgtggccggcctatctggatgtgccggacggctgggaaacccgcctgacgaatgaaacccgccccgtttgtctcgaatatattgaaacaaactggcgtgatatgaggccggaaagcctgaagcggaccgaagctgctaaaatgtaataagaaaagcctgccgttatttcggcaggctttttatgcggacatcagccgttaagctgtgtatgatcacaaaatgtataagggtggccttcttcatccgtgcaccatgactgagacagaaaagccaaaaagaccgcggcccactggtctgcaaactggattaaaataccgccgtcgtgccacgttccgttatccttcttccagcgtgtatcaattgggtttccctgattcatatgaatattatgcatgccgtttgtcggcttgaacccgaaaatcttatcagcgcccggctccggcccgaatttagagccgtaaatatagacggtggctttttctgatttggctttttgcatgtacgtctcaataaagtcatttaagtcattatccggaccggtgacttcatgcggaaggggcaccatgttccggggatcaaacaatccgccgcggacataatccagcgccagctcacgtctggtttcatcaattggggtatatccgtacggaatgttcggcagcagggtgatcgcgcttgcgtcaaaatgatcgcgtgccgcatacagcacctctgattcttttgaacttgacatgacattgatcgcacagcgatagcgcgtatcaggctcgcctagcacctcgacttgaaaatgcggagaatcatcatctgtttcccttttcatatctaacacagtgccttttaatacaccatagtgctgaacagccatatgaatcctcctttttcttccgggatatgaattgatattcgagacagggggccgtttttccttttgtgagaaagaaaaaaggacagcccgctgatcaggctgtcctcttcatctctattaagcttttgcagccgaaccttgcattgctttttcagcaggcacgtagtcatagcctaagtctttggctaccgcttcatacgtgacatgtccgttagccgtatttaagcccgctttaagcgcagggctgtctgcaatggcttgtgccgcgcctttattggcgatttgaagcgcgtaaggaacggttacattcgttaatgcgagcgtagacgtacgcggtacggcgcccggcatattggcgacagcgtagtgaacgacgccgtgtttttcgtaagtcggattatcgtgggttgtaatatgatcaacggtttccacaatgccgccctgatcgatggcaacatcaacaatgacggaacccggtttcatttgtttaaccatttcttccgtaacgagagtcggcgctttggctcccgggatgagcacggcgcagatcagaagatccgcttccgcgacggaatctgcaatatttacagggtttgacatcaatgttttaatctgatgcccgaaaatatcatcaagctgacgcaggcggtctgcgttcaaatcgatcattgtcacatcggcaccgagtccgacagccattttcgcggcatttgttccgacgccgccccctccgatgatcgtgacttttccgcgggatacacccggtacgccggctaataaaattccttttccgccctttggtttttcaagaaactgtgccccgatctgcgcggccattctgccggccacttcggacatcggcgtaagcagcggaagggaacgtccgtccgttaccgtttcgtacgcgatagctgtcacacctttttctgtaagcgctttagctaattccggctctgcggctaaatgaaggtaagtgaacaagaccagaccttgacggaaatacgcatactcttcagccagcggttcttttaccttcatgaccatttccgcatcccatacttgctttctgtcctccagaatttccgcccctgctgatacataatcttcatttgtaaagccgcttccgagtcccgctccggattccacaagaacccgatggccgtttccgataagctgtgaaacgcctccaggtgttaatgccactcgattttcattgtttttgatttcttttggaaccccgataatcatgtctgtttcccccaatgtttgtgtgatgcttcaagtgtagcgcgatttttgcgaaaattctttgtttgaaacagaaaataaaaaaacacggatttgtgaaatttcacgaacccatgctgcgaagtttgatatccaggtaaatcgtaaacttctcattcacattttttaagtcgatttctgcgatctggctgattcttttcagcctgtaattcaatgtattgacatggatgttaagcgctttagcggcggtgttgacattgctgtcggcatcaataaaatgttcgagcgtttttaccatatcggcttggtgctccctgtcatactgctcaagctttgacagggaatagttcatatagccgctgtgcttgcgtttttcatccaacacatcaaggtactgataaatgccgagttcagaaaagctgaaaaggtgtttggtttctctcacaaaccgctctttcgcttttaatacggaaagcgcttcctgataggatcggtaaacgtaagaaatcgattcgtaaataccgccgatcgcaatcgacgcatcctcaattttatatcgttccttcaactgtttttgaatatgaagagcgaagtgctttaaatctttaaaaggctgatcggttttcggcgcggctaataagattaattcatttgaatcaacagtcgccagcatgacatgaatctgctgtgtcgtttcctgcaaatattgcagctgctgttccgtcttttcagtcagctcatcatgtaaacggatgatcatgacgctgaacacggacggcagcgccattccgagcttatgaaacccttcggccatctcggcttcctgataaatatggccggtcagcattttccaaaaaaactcctggccccgctcttcgattttcgttttgcggatctgcaggtgcaaaagcttgttccgcaccgctttggctgccagctgaagtgtcttcagatcttcgtcattgagcttttttttgatctcaagcgcccaaataaatccgagaacctgactgtttttccagatggaaatcgccacgcggttgcttaggcccacctcgtcaatttctttcactttgatcggctggtccgtttttaaaagggccggaatggttccgtctttccacagtttgttgatgactttttccggcaccctccgcccgataatcgtcgacgtccgggcaggatctgtacaatcgctgtgcgtgctgtatgcaagcagtttatgattaacgtcttctattgtaatggggcattgaagaacttcactgatatggtcggcaacatcttcaagcctgtcgaaactgtacttaaatggatcttttggattggtcatctgtatccctactttttcatagcttcatatcttgatcttaccatcttgcttttcagactgaaaggcatctttgcagggaaatagactaggacaataagatcattcagtgaaaacgaaaataataagaaaatcatactattttatttacaaaatgtgtaattatgacgaaaaatccaatatatcataagactcattttgtaaaattaaaacagatttgtttgactgtgccgattggttgtttttataataatgacgttcaaaaaataagtgaattagcccatatttaggctgatgacacaggagggtataaggaatatgtctggattaattcgtgtcacacccgaagagctaagagcgatggctaagcaatatggcgttgaaagtcaggaagtcatgaatcaggttgaccgcctgaaccgcatgatttctgatttgaaaggcatgtgggaaggtgcttcaagtgaagcattcgcggatcaatatgagcagctgaaaccttcatttattaaaatgtctgaattgcttcaagatgtgaatcatcagctcgatcaaacggcaaatacgcttgagtctaccgaccaagatatcgctaaccaaattcgcggataataagatgaatgaagaaacggagcgcctgattcaatcaagaagacggcgctctttctatgtaagggtgatatgaatatgtatatcgatattacaatagatttaacacattataacggcagcgtcttcgatctcagattgtcagattaccattctgtgaaaaaagtcattgatattgcccggcaggctcagcatgtatccgttccgccgcgtgaaggctattggatcagagtggtcaataaagaaacggttttttccggagaacaaaagctatctgactgcggcattacgaacggagaccgccttgaaattttatgaaaggacatggtggaatgacaggtcataacagatcttatttagaaacagaattagacgccgtccgggaagaaaccgaatcaggcttcacgttcaccttccagcgggaaaaaatcaagcttcttgacgggctggaagcgaatgtgattaaagatgccgatcctttttttcaaaaagaggtctcagtttcagaagacgaagtaaccatcacaatcaaacctccttcttcttatcaggctttccgctatataaaaggaaaagataaaaaaagcaggtggcaatttgcctaccgtctcgtccaagccgtgaaacagcataagctgaaacgtctcaatctgattgccgcccctgaaaatatcgtgtttgataaagcgctgacgccttactttcttcattacggcgtaaaggagagccttccgccttatgaggaagatagagaaagggtgttaaaagagctcaaagcctgtgcggcgcttgcagctgacggggcgtacaccttcgatgaatatttgaagtacaaggagacgcttcatttctctcctgaggtgaaaagcgtgttagaggcggagacgattgaagaactggaagaagccattcaaaccgcaatcgattccctcgaagaaagggacaagacatacataaaactgccgaaaaagaaatggaaaatccaaagatacgccggtctggcgcttgccgtcctccttgtgccggcacttctttactccttatacgttctgtttttcgtccagccgaagcaagaggcaattacggaaagcaaccgctattttttaaatcagcagtacagcaaagtcattgacacactcgctaaatacgatgcggaaagcctcccggaatctgtgcagtacgagcttgcttcctcttatgtggcagttgaaaatctgagggaagaacagcggaaaaacatcgggaatctggtcacgctgcaatcagacccgaagcacttcctttattggattgatatcggcagaggggaaaatgaagaagccatcaaaatcggccgcaatcttgagtacaacccgtacatctggctcggacttacaaaatataaacagcaattattagcggatgacagtatgaaagacgacgaaaagcagaaagaactggacgccgtggaaagcgagcttgcgaaggcgaaaaaagaggcggaggaacagcataaagaagcggaggaaaacagtgacaccgccgaagcttccgccggacaagatgaaagcaaacaagacaaagcgaaagataacaaagagaacgacaagaaagatgagaaaaaagatgaaaaaaaataacagcacacatcaaatggccgcatgtaacgatcaggctgtcgtcaggaggttcgccatatgagtctgttatgggtcttttaccgagagcacgtacaaaaggttcagctgtctgaactcccgccctctcagccgattacgatcggtccggatatgaaagatacaatcacggtcggcacacttccgttacggcaaaacgccgcaaccctttatcggaaagaaacagatcgttatgatgttttcctgggaaataactgtgccggcgaattgacaataggaaatgaaatgccctgccggattgaagaagagacgatgcggcttctgctcacccctgaccaggaagaatcctccgtgtactttatcggcgggaaggatgagatcgttttctcatcagaaacagaggaagcggatatatacaaagagccgtcctccgctcaaacaggggctttttatctgcgtaagtcgggaggatgctggtctgtcgtccctgatggtcaggaagtttatgtgaacggaaagcttgcagaagctcccgaaaggctccggacgggagatgagctgctgtggaattttctgcgtgtgaggctgacggaggacgaccttttagaaatcgttcatcacgaaaagcttcaagccggtttaaccaaaacggtaaaaccaagcaccgaaatgaaaaagaaatacccgcaatatcgaagaacgccgcgcatggtctacgatcttcccgaagaccgcgtttcattcagctttccctcgcaggaaagcgaacagaataaccgggggctgtggctcgtcattctgcctcctgtggtcatgctgattgtaatgggggttgtcgctattatacagccgaggggcatattcatccttgtctctttggcgatgtttatgatgactctcattacgtccaccgtgcagtatttccgtgaaaaaaaccagcggaaaaaacgggaggaaaaacgggagcgtgtgtacaagcagtatttagaaagcaaacggaaagagcttcagacgctgtcggaaaaacagctgcacgtgctgacgcatcattttcccccgtttgaaaaaatgaaatatttaacttctgaaatcagcggccgcatttgggagaaatcgctggaaagcagggattttctgatgcttcggctcggaacgggcacggtcccgtcaagctacgagatttcaatgagcggcggagacctggcgaaccgtgatgtggatgacttgatggagcagtcgcagcacatgcagcgtgtgtataaagacatccgccatgcgcccgtgaccgttgatttacaagaagggccgatggggcttgtcgggaaacctcagatcgtcaaaaatgaaattcaccagctgatcggccagctcgcgttcttcaacagctaccatgacctgcgatttgtctttatctttcatgaggacgaatataaggaatgggaatggatgaagtggctgccgcaatttcagctgcctcatatgtatgcgaaaggatttatttacaatgaacagacccgcgatcaattgttatcgtccatttacgagctgctgcgggagcgggatttggaagaggataaagaaaaaaagatctttcagccgcattttgtctttgtcatcacaaatcagcagctgatcgcagagcacgtcattttagaatacatcgaaggccggcatgagcatctcggcatctcggccatcattgccgcggaaacaaaggaaagcctggcagaaaacattcacaccctcgtccgctacattaatgaagatgagggagacattctcattcaacagaaaaaagcggtgcagatcccgtttaagctggacaggcatgaacggacaaacaacgagcggttttcccggacgcttcggacattgcaccatcaggtcggaatgacgaattccattcctgaaacggtctcatttctcgagctgtttcatgcgaaggaagtaaaagaaatcggcatcaggcagaagtgggagacaagtgagtctgcaaaatcgctggctgttccgatcggctataaaggaaaagacgacatcgtctatttaaacctgcatgaaaaagcgcacgggccgcacggattgctggcgggaacgaccggctccgggaaaagtgaatttctgcaaacatatatcctgtcattggccgttcactttcacccgcatgaagcggcgtttttgctgattgactataagggcggaggaatggcgcagccgttccgcaaaatgccgcaccttctcgggaccatcacgaatattgaaggaagcagaaacttcagtatcagggcgcttgcatccattaagagcgagctgaaaaaacggcagcggctgtttgatcaatatcgcgtcaatcacatcaatgactatacaaaactgtataaacagggagaaacggatattccgatgccgcacctgtttttgatttcagatgaattcgccgagctgaaaagcgaagagcctgactttatcagggagcttgtcagcgcggcccgcatcggacggagccttggtgtgcatttaattctcgccacgcaaaagccgggcggcatcattgacgaccaaatatggagcaactcacgctttaaggtcgcgctgaaagtgcaggatgcaagtgacagtaaagaaatcctgaaaaacagtgatgcggcgaatattacggtcaccggacgcggctacttgcaagtcggaaataacgaagtgtatgagcagtttcagtctgcctggagcggcgccccttacatggaagatgtatacggcaccgaggatgacattgccatcgttaccgataccggcttaattccgctgtctgaggtggatgcggatgatgcggcgaaaaaagacgccccggcagaaatagaagccgtagtcgaagaaatcgagcggattcaaaatgaaatgggcattgaaaagctgccgagcccgtggcttccgccgcttgccgaacgtatcccgcgcacgctttaccccgcgcaggaaaaagaccgcttcttcatcgcctgcgttgatgagcctgatcagcaaagacaggcgcctctcgcttacacaatgatggatgacggcaacatcggcattttcggctcatccggctacggcaagtcagtggctgccatcaccttcctgatgaatttcgcggaaggatacacgccggaagagcttcatatgtacatctttgacttcggaaacggcacgcttctgccattggcaaagcttccgcacaccgcagactatttcttaatggatcaaatgagaaagatcgaaaaattcatgatccgcatcaaggaagaaatcgagcggcggaaacggctgttcagggaaaaagaagtcagccatatcaaaatgtacaattcgctcagtgaagaagagctgccgtttatatttatcacaattgacaatttcgacatcgtcaaagacgaaatgcatgaattagaaacggaatttatccagatttcacgcgacgggcaaagcttaggcatttacttcctgctgaccgcaacgagggtaaacgccgtccgccagtcgctgttaaacaacataaaaacgaaagtcgtccattatttaatggatcagtcagaaggatactccatttacgggcgtccgccgttcagtctcgaaccgatcccgggccgcgtcatgatccaaaaagaagaactgtatttcgcgcaaatgtttcttccggctgaagcggaaaatgacctcgagatgttccaggcgctgaaagctgatgtcaaagctttagctgagcgccacgccggaacagccggaccagacccgattccgatgcttccggatatgctgacggccggcgaattttcactccgtctcggcccggaacaagacccgttccgcattcctgtcgggcttcatgaggaaaaggtcagccctgtgtactttgatctgggtaaaaataagcattgtcttattttgggccagacacagcgtggaaaaacaaatatcctgaaagtgatgctgaatcacctgctgcgtgaaggtgcggaacgggtcgggctgtttgactcgattgaccgcggactgtcgcagtatgcgcaggaaacaaaggtcagctatctggacacaaaagaagacgtccggcagtggatcgaaacggcagaagccattttcacggagcgcgaagctcagtatacgcaggccgtcaaaaatggcgatgtgcacaaactcagtttctctccggtcgtgttaatggccgacggcattacaagattccagcagacgatcgacaccgccttacaggacaagctggcgatgtttatgaaatcttacgcgcatgtgggcttcagttttatcccggcgggcaatcacagcgaattctcaaaaggctatgattccttaacgacggaaatgaaacagatccgccacgcgatgctgcttgtgaaaaaatccgaacaaaatgtcattccgctgccttaccaaaggcaggaaccggacattcagccgggcttcggctatttggttgaaaacgggaaggagcaaaaaatccaaatacctttatgttcagcggaaagggaggccgtcagatgaccgaacaacgaaaaagcctgatcaaattaatagccgcggtcgtcatcattctgctgctgccggtgctgtttttccggtttatcggcgatgacccgggaaaacaaaaaatcaacgccacccgccaaatcgcagtcgtgaatgaagatatgggcttacaaacagatgaaaatgaggaagaggaatccgtccatttcggcaaagaagtagcggccgctctcggcggccgtccggattattcatggacggttgtcaacaggagcgcggcagaaaacggtctggcggctaagaaatatgacgccgtcgtttacattccatccgatttttcaaaagacatcttaagctatgacaaggagcgtccgcaaaaagccacgctgacattcaatattcaaagcaacctgaacgccgtcaacaaagaaaaagtgcagcgtgagcttgaagacgcccaaaaatcaatgaataaaaaaatgtcggcattatattggaatttcgtctcacaaaaagtgaacaatgtccgaggcgattttgacaagatcgtcaataaagaatcagagtttcaaaatgtcatgtacaacttttacaagccgagctccaatgacttggcaggtgaaatcaaacggcaaaaagacctgattgacgaactgaaaaaatcaatgaatgaagcgcagggcgcggcaaaagaaaaactgacttcggcagatgaagccaaaaccacgctcaaagactttgccgacacggtcgagcgctacaaacaatatcaagaaaatcagaaaaaactgctgatggccgcgcaggaacaaaatcaaaagcaaatcacaaccggactgaacgccattaaagcacagcaggccgccaaccagttcagcacgatgatgagcgggctctcttcaggcataaaccgggcgcagacacagcttgaccagacgggatcggctctttttgccgcccaacaggtgagagaagcgcaggttcctgatcaggaacgcgggatggcgaatattcaatccaatttactggacaattatttgactcaatataaagcgcaagcaagatttgaaacattgaacagcattcaaacccttatgaaaagggatcggccggcattaaccgttccggaaaaggacccgggtgatgacggctcggatgaaccgaaagaagaagaaaaaccggaagaagaaaaacccggcgatctgaaaattgaccttgacgatcagcgtgacgaattaaaacgcatctccgctgaaatcaatcacatttctgacggattaaaagaaccggaaaaagaaaaaccggaaccggaagaaccgggccaaggcgatgacggtgaaaactccggcgataccgatccgaataacggaacggctcccggagaagacggaaaaacggaagacggcacaaaagaagagcagcctgcctccgataacacaggcgatcaggagccaaaaaccgtccagacctcgacagccgctgaaaacgtcactccgcctgctgatgagccggcggacgatccaaacgattctgaaagggacggcggcacggacatatctgaggcaaaagaaaggctgaaccaagccgcagaacgcattcagcaaattgaaaaagagctggaagagaaacagcagactcataataaagaactgaaaaaacgtctcgatgctcttgatgaagaaatccaaggccttaaaaatcagattgccaaagttgaaaaacgggcagataaattaaaggaaaatttggaagaattggaagaaacgagaaaacaagacttcgataccgtttacagaatgattgtaagaacagaacagaacattctgaactacccgtcattggatagcggccgcaaatctgctcttgaacagatgtttgccgctgacatcaatacaaaaaagatatccgatttaatgagttactataatgatttatccctgtatgaggcgacactctatcactctcttgacgcgggctcgctgcctgatgtgaaaaaccgggtgctgaaagcccagcaaggtgaagtccaaaccgttcttgccatcaaaccggaagaaacggcaagctgggaaaatctgaaaaacaacaaaatgcagactgatgaagacatcagcaatttcattaaaggcatgaccgaattctcggataactacagctcgtatatcagagatgagcaagccggggtgctcgatgagcttgccagcatttcagacagcgcggcgaaagcatccgatcagctggctgaaggcgctgtgcaggaagcggccgcgttcagcggagacggattaaccggaacgatggcgctcggcgctcaggataccgtcggccgtgaagtcctgcaaatgtctgacacgatgggccatctgtcagaacgccagtccggcatcatcagctataccgacaatatgcagcaaagcgtaaatgacgtccagcaaaaagcggacaccctgaacagcaactggggcaaaaacgtcgattccacgaaattgatcagaaatgacgtgtacggcattttagggaacgcgctcgttgacggacaggaaaacggatatgtttatgattatctcgccaatccgcttaaaatcagcggagaggtgccggaagaccgggttcagaatgttccgccggtcgtcattttggtgatcgtcctgatcagcagtcttctgatcggctatttcagctcgtattatcagcaggcgccgcttcttgtcaaaggcgcgctctttgggattttaaacattatggtcggattgatgatcagtctgttcggtctgaatatctattcgcttccggatgatcagacgattaaatggtcagtctttacgattctcctgcttgcggcgagttcagcttttatccgggcagcctttgtcttcagctcaattaccggatggatcgcatcatcagcgctcattctcttttatgtggcgcctttgatcgacctgattatgccgaacttcacctttgacagtccggtttcgaaagtctatatcgatattcaatacggaacgggccatctgtttgcgttgggggtaacggttcttgcgatcattacgctgattgcggcggcgcttccgctcgtcattcggctgtttgcggaaaaaacggaggaaagtgatcagtcttatgaggcgtaacacgttcatggaaaaaggattgctgctgtttgctctctcctttttccttttccttccccaagccgcagccgcgaatgaggaaaatactgatgtcaagccgaatgaatatgaaaagaaagacattgaaattcgtacggactacctgcacgacgatgcctactccgaggaaaaaacggcgcttccgaaagaacagaaggatatcacgtttgatcagccggccgaaaacccggatgacaaactgatatcaaatttgtttacatcgtcagacacggagccgaatacgatcaaagcgcaatcgaaacaactgggtatcacatttgccgagccggcggtgcggcatacctcggcagatatggaaacggaagagaaaaagacttcttatctgcttcccgctatttatgccgtcttgatcctcctcgggattgcggcaatgatctatctgatcccgaaagtcacggcgcaggaaaaggcaaagcggtaaaacggatcgcttgtgtttgcgggaagacagcccgtaaaataagaaaaaaaggaggagtttcatgcagttttttcttataacaggcgcgtcaaaaggcttgggccgggcgcttacggaacaggcgcttcaagaaggagccgaagtcgccgcgctttcaagaacgataagcggggaaaagcgcgaggggctgacagaatacagtgttgatttaaccgatctcgcagataccgggcggcagatgaaggcgattcttgatcaagcagaggagaaggggtactccgccgtcacactgatcaacaatgccggaatggtggaaccgatcaagcgggcgaaagaggcttccgccgaagaattgaaccgccattacacccttaacctgacggcgcccgttttgctcagccaaatgttcacaaagcgcttcgaagcgttcagcggcagcaaaacaattgtcaacatcacatcgggcgcggcgaaaaatccttataaaggctggagcgcgtattgcagctcaaaagcggggcttgatatgtttacgagaacattcgggtttgaacaggaagatgaagagctgccggtccgcatgatatcattctcgccgggagtgatggatacagacatgcagtcggtcatccgttcttcgtcaaaagaagatttccatgacatcgaacggttccgcaatctgaaagaaacgaaaaacctcagaagtcctgaatacatcgccggcgtcattcactcactgatcgcgggcgagccggaaaacggacggatatacgatatcaaagaatttttgtagagcagctttcacgctgctctttttttgtttgtacaatcacttaggggtccggcggcatatgatgaatgaaacaacatataaggggtataagaaatgtatcagatgaattgagtttcttctcgatttatgttaggattctaaaaatatatgaaggaggggtttccatgagaaatgtaacgttaatggatgtcttcacccatccaatcgcacaaaagtatttacagcgttccggtgtcgcccatgcgatcgcctgcgcgtttcatgcataccgtcttgccgtaaaagcaggtgtcagcccggatctggcggcgaaagcggcattactgcatgacgtcggccattatgaatggtacacagacggcaaatgggattatgaaaagtacagaagaaatgatatccatgccattaaaggcgcggaacgggcgcataagctgctcatccggctcggtgaagaaccgaaagcggcgaaggacattgcgctggcgattctgcttcacaccgattcctatctgcctgaaggcgaactggacaagaatacgctccagcaaatcgtgaaacaagcggatgaactcgatgaagaacccggcggacatcaccattaccgccaaatggatcacacggccgcgctcaaacaaatccaaaagcttgatcagttaattgaccgagcccaatatcccataagaagctcagtctaggccactcatgcggccttttccgcttacataactccgcatgctcactaacaccttttccgctccgatagacgtactgtgtcaaagcctttgtccgctgcatatgctgaaggaaaacatagtaaaggggatcagcgaaaatggcccatcaaggaagcccgcaaatcgtctcgttagtggatccttacgtttatcagaccatccataagcttatcggctcaaggtttatcattcaaaccgtcagacgcattgtcagaggacggctgattgatgccactccggatcacatcgccattgaagagacgcatgaccgtgtattttatatcagaaaccgccatgtggtttccgtcatgcctgattataccgaacgcgtgtaacagcccgaaaaggcgcaaaccggaggcggcactatagaaccccggtgcgtcttcttttttgagatacatagatgcacggcggctttttttggtacaatcacagtacaagttcacacgacaataggaggaaaccgcttgttgaaatcaaaggtccatttttggacgctgcaaattttgctcgttttgctcattatttacgtatcaacgaaagtctcgtttatatttcagccgtttttcggttttatcaccactctgttttttccgattttgatctcgggcattttgtttttcatttttaatccgatcgtgcgcctgcttgagaaaaaaatcccccggacattggcgatcctgctcatttatctcgttttcatcggtctgattgcctttatgttcactgccatcgggccgattgtggcttcccaggtcacggggctgattaacaatttccctgattacattcatcagattcaagtcttgacggcgcaattatcccattccaaatggtttacgtggatgatgacgcaggattatgtgtcgatagaaaaaatccagcagtctctgacgggatttttacaaagccttccgcaaaatattacggcaagcctgtcggccgtgttcggcgtcgttacgaatatcacgcttgtcgtgatcaccgttccgttcattttgttttatatgctgaaggacggccggcggtttccgctcttggcggtcaaaattctgccttcttcctaccgggcggaaggtcggaaaatatttaacgacttatatgtcacattggccgcctatttccaaggccagctgctgatttgtctctttgtcggaacggcatgttttatcggatattggatcatcggcctgccgtatgcgttaattctcgggatggtgatcgccgtcaccaatatcattccgtacctggggccgtttctcggggcggcgcccgcggtgattattgcgtttatggattcgccggctaaggcgctgtttgccgttattgttgtcgttgtcgtccagcagcttgacgggaacctgctttctccgcttgtgattggaaaacggctgaatacccacccgctcaccattattcttctgcttatcggagcgggcagtttcggcggcattctcgcaatgatcctggccgtgccggtttacgcggttttaaaagctttcgtcttaaatatcgtccggcttatcaaacttcgtcagcggtcaaagctcgaagacagccgcaagccgaaataaaaacgggcacaactcccggtgcagcgcataaaatgctgtaaagaaaagcggaggtgtgggtatgcctgcaattgtgggaccgatttatattatgagtttagccggagacgctgcagcgagcttcggtgacgtgtttgccatttctcccaaagccgttgaccactcaggcgcgggggcaggggcgtttcattccggagattttgtcaaaattactaataaattcagcaaaacgcgctttgaagacattgatgtgtttgacgaacctgattggtttaacgcgtgacagcctccttttaggaggctgtcgcttttttgtagtataatagaatcagtctttataaaaggggaatgttttatgaaaatcagaaaagcgaatattaccgtgcagtccggaatgatcggtgatgtatatctgcatgaaaataaaaaagaacagcatacccttgtagccgttccggaacttgagtggagcacgatcatttcctatgaggaagagaaaaaggcgctggcgcagcggcttttacaatcattcagcaagctgattgaagaagaacccgccggagagctcgccggcaagatctcccattgggtggctgaaatgtaacgaaaacggtttaccgcgtcccgtccggggcgataattgtaaaacaagctgggagggacaggccgatgagcgacaaaacggttgacctttatttacagcaggggatgtacggccctttgcagacgaaaccggatgaacgccatttatttttaggctcgctgcgtgaaagagtcatcattgccctgacgaagggacaggtgctgcaaaagcagccgtatgaagaagtgaaacaggcgctgaaaagccgaaaagacgcggtgctctatataaacggaaggctcccgtatcatgcttattcaccatatatgaagcttgccgcacttgccggtgtccgaagctccgtcatctcggaccttcaattcgaaacgccgctcggcctggtttttgccgccgattatgccgtgaaccttgacggcatttacgtgcaggatgacatttttcagcgctcactcctgaaatcttaaaagggcaaaacactgtttgtcattttacaatgccaattcacttacaagtggagataggatataatggttttcatatgaatggcggggaggccggctatgaaaaaagcatttatatgcattgattatacgaatgattttgcagctgagaacggggcattaacctgcggagaacccgcgagacagattgaagatacgattgtcagtttgacgcaagcatttatagaaaacggtgattacgttgtctttgcggtagattcgcatgatgcagacgatgactttcatcccgagacacgcctgtttcctccgcataatatcaacggcacggagggcaaagagctgtacggaaggctatcgcctctttatgagaaacataaacacgcaaaaaacgtaaattatatggaaaaaacgagatattctgcttttgcgggaacggatttagagctgaaactgcgggaacggcagatcactgagctgcatcttgcgggcctgtgcaccgacatctgcgttcttcacacggcggttgacgcctacaacaagggctttcagatcgtcattcatcaaaacgctgtggccagctttaatccggaagggcatgaatgggccctgtcccattttaagaacagcatcggagcgcaagtggcagagtaaggaaggggaaaacaattttggtggagcatggttttaaagacgacagtttgtctttacatacagacctttatcaaattaatatggccgaaacgtactggagagacggcattcatgagaaaaaagcgatttttgagctttttttcagaaagcttccctttgaaaacggctatgcggtatttgcgggcttagaaaaagcaatcgaatacttggagaacttcaaatttaccgacagcgatctgaattatttaaaaacggaattgcactatgctgatgatttcattgattatttacgggatctttcttttaccggatctctttacagcatgaaagaaggcgagctcgtttttaacaatgaaccgattatgcgggtcgaagcacccctgattgaagcgcagctgattgagacggctctgcttaacattgtgaattaccaaacattaatcgccacgaaagcggcccgcattaaaggcgttgtcggtgatgaagacgccctcgaattcggaacgcggcgcgcccatgaaatggatgcggccatgtggggagcgagagcggctttgatcggcggcttcagcgcgacgagtaatgtaagagccggaaagcgttttaatataccggtatccggcacgcacgctcatgcgctcgtacaagcgtaccgcgatgaatatacggcatttaagaaatatgcggagacccacaaagactgcgtatttctcgtagatacgtacgatacgatccgttcaggcatgccgaatgcgattaaagtcgcaaaggaattcggcgaccggatcaacttcatcggcatccgcctggacagcggggacttggcgtacctgtcaaaaaaagcgcgtgaaatgcttgatgaagcgggtttcacagacgcaaaggtcattgcttcaagcgatcttgatgagcacacgatattaaacctgaaatcccaaggagcgaaaatcgatacgtggggcatcggcacgaagctgattaccgcatacgatcagccggctctcggcgcggtttataagcttgtcgccattgaagaggacggcaaactgaccgacaccattaaaatttcgtcaaaccctgaaaaagtgacaacgccgggaagaaagagagtataccggattatcaacaagctgaatcaccactcggaaggtgattatatcgcgctttatgacgagcgggtaaatgatcagaaacgcttaaaaatgttccatcccgtccacacgttcgtcagcaaattcgtcactgacttctatgcgaaagacttgcatgagccgatctttgaaaacggcgttttatgctatgataatcccgaaattaccgacatccagcaatacgtgcaggataacctcaaacttctgtgggaggaatacaaacggatcagcaagccggaagaatatccggtcgatttaagcgaagactgctggagcaacaagatgcagcggattcatgaaatcaaaagcaagctgaaacgggaacttgaatagaaaacaaagcggcctttcctatctctggaaaggcttttttgttgtgataatatttttcacatttagacaaatttcgtcaagttatttgatatacttatgttcgaaggccgcatctaagggggtaaatgaatgaaggtgtttgttgcgagacagcctatcttcaacagaaacgaacaggttgttgcttatgaacttctttaccgggagagcgaagagaaccgttattcggccgcggatggagataaagctacgacggatctcattattaacagctttatcaacatcggaatcgaaaagctgactgaggggaaacgctgctttgtgaattttacagaaagcctgatgttttcagatctccctacctcctttgatcctgaccagcttattatcgaaattcttgaggacataccgatcactccggcgctcatctcaagatgcagacagctgaagaaattaggatatacattagcacttgatgatttttacgccatcaatccggaaaatgaagagttagtggaacagctgatgaaatatattgatattttaaaaatcgactttttgcaatcctcgcgtctggagcgcaaaaaaatcattcagacgtacagctgtaaaagtctgatttatttagcggagaaagtggagacgagaaaagattataaacaggcggccatagacggctttcacctgtttcaaggatattttttcagtgaaccgcgtgtcatcagcggaaatgatctgacgtttcattttcattcttactaccagcttttaagcgaattaaacaatgaccagcctaatatacagcgcgtgacggaatacatagagcgtgacgtcagcttatcgtatcagattctgcgttttttaaacggatcgcaaacaagactgaaaaaaaagatagacagcatccagcaggccatcatgatgctcgggctgaatgagattaagcgcttgatttacattctttcattcagagatttaacggcgaaaagccactcaagccaaaaagaaatcattaagatttccttaatcagggccaaactgtgcgaactgctggcgaaaagaaccggaaggccccagccctcttcttacatgctgatcggcatgttttcgctcatcgatacgcttctccacagggaactggaggatatcatcaaagaactgcctttaatcgatgaagtcggacaggcgctgctcggttatgaaaacgattattataagatgctcgcgctcgtcaaagccattgaatgcaacaactgggactgtgacgagtggggaaaagaactgaacaaagaagaagcgtatgaatgttacttacaggcgatcgaatggtgccggcagctgatcgattgagccgctttaagccgaccatctgagggcgatgataaaccggctttgctctctgatcagactgacacggatgccgtcgggattatacgtcacgtcaaagtcatttttgatgccggtctgcttaatgagccgcttgaccgctgcggtgtcagatgattgcgctgcggtgaggatgctgcgcgcaagctcttttgacgccgacagccgcgcaaggagcaggcgcgcatcctccagcatgcccgcagcttcttttgcggacgctgtcaaaatatctgcgtgaaccggggcactgggcgctggatgccggtatggcgcggcgaaaacagggcagcatggatacacataatgcatacggcggcctccttcctgagaaaacattcgttatacatgagtataggcggcgtgataatgagttatgacatgcaaaaagaccacaatgcgggggttgcggtcttttcggtgtttgtcggtggttatgcgacgctgtttgcccattctgttttgaaattgtgacggcagggactatagtccctgccggtttgtcggaaaaccgttgaaaaaacagcagaaccgccagattggtctgctttatcctaaacgtctgcctttgcggtagttatatagtcctgttcgctaaatgccctgttcgggactatggaattaccttggtttgcggtgtcacgcagatacttttacacatacttttcggtgaaaaatcccgcaaaaacgtttacactattagtaacagatcaaatacctaggactcgttcaccatacacaattcattgatctttcaaaaaaaggagtgtggaaacggtggaaaacaaattagaagaagtaaagcaattattattccgacttgaaaatgatatcagagaaacaaccgactcattacgaaacattaacaaaagcattgatcagctcgataaattctcatatgcaatgaaaatttcttaaaaagacttggaaacaagtcttttttttgtgcattttttatccatttcatggataaagtattatacgattgttaaaaaacgaaaaacctgctgtctttcatcacctgcatttagtaaaatagaatgggagggtgaagacaattattgagcaaatgtgtttagatgccgaaacgattaaagagaagatgaaggaaattgtggaggagaaaataaataatccacatttaaaagacacccttcagacttttataaatgaaaaaaatcattttgcttttggtgttcttgcatttaagcattatgtggctttcgatggtgagcattattcggatattacgttattagcttcaggaattgaattgttaattttagcttttgatatttttgacgatatagaggatgaagataacttggataaggaatggatgaagatagatcaatctatctctttaaatgcagccacttctctttattcaataagtcttcaagtgatttgtgagcttaaaacgaactccgattttccccggcttgctatgaaatatgctttaaatgcaatgcaaggtcagcataatgacctcgaaaatttccccgaaactgaagacgaatgtcttcaaatgattaaacaaaaatcaggctcgcttactgcaatgtcagctgtattaggaacaatgcttgcaaatggggagtttaacgaagaaattgagaattattcctataaaattggaattgttaaacagattgaaaatgattattatggtctttttaataaaaatcgtagtgatatcagaaagggaagaaaaacattaattctgttgtatctaaagcgaagatttaatgctgcttcagaaaaaatcttggatttaatgaatgcagaagcaagttaccattcattcctcattgataataaaaaaagccttgaagacctactatttgatgcaggagttagccagtatgtttcaatgttaattaaaatgtacgaggaagaaattacgacaagtataaaagatttaaatataatgttagaactttaatggaggaaattacagtgaagcaagatatcgtacattatcttatggaaaatccacttgtacttacaaagttagcgtgtggggaagctagtttaataggagttccggataaactgttacctgccattgttgagatttttgaaagggacttaagtcaatcaaaaaaatgcaggggaattttttgggaacaatgattgagagagtgagatctattgaaaaaattcattagaaatttttcgattgtattgttattcgtcagtctcttttacgtcgctcatattatatattttactcaaaacggaattttggtaggaacctatgtggttgaaaacaataaccatgaattgcaggttgtaaaactctccaagtctacgtatggtaaatatatgggcttaaaagagggagacaggataattgaaataagcggaaaaacaccgacagaagagaatataagaggtcaatatctagcgaaagctgaacatatgaaaataataaggggtaatagtaaaatagacttacataatactgagtttatttccttaaatagctcttatagtttttttatctatattatcccatgcatattatttgctttaagcatgttatgcattttttatatttataaagttaacagagtaaaagatacttattcagcctttattttgattatttttttattgtgtacatccattgcatatttaagcgcaggtggagtaactagaggatatgaaataaacagatatattaacctttttacatttttgaacgtacctgtattatactttcactttttgtatcaatactttaaagaattaaaattgaaattttcagctggttatgttgtgtctactctctatatattgccggttattaatataataatcgagatattccagaagcattttgccttccaacttgttacgaatattaatttagtaacattttttttggaaatgatggtcgtctatacatccattattttttatggactagtctaccgaaaaaaggatcacttttatttgctgaaagtattacttatatctaataccatagccttttttccgtttacagtattttatattatacctgaggtgttgttcggacagtatatttattctgctatagttacggcaccatttttaataattattccattagctttagtctatcaattcgtggtcaataaaatctacgatatagacttcttgttgggcagaattagatactatggtttcctttccattattccgactattggagttgtatggctgaatatattattcgacagcaaggggaataactttaacattattcaaatcactgtatatgtatttttgatttttttagcggtattttatattaaggagttattagactacaaatttcgcctgaaacgtttttcagaaaaatataattatcaagacagcatatttaaatatacacagcttcttaaaagcgtatcagctttaaaccaagtgtttatgaatcttaaaaagacgatattagatgtgttgcctgtcagtaaggcatatatctttgaaatcagttctgacggagatattctgtattttgataaacagaacagtgaaccgaactggcagccgtataaaaaagaatttgttaaagtctcatcagagattggcaagatttttgaagtaaatcaaggttttctgatgaagattggagaaagaggggcaaactcatacgttctgctttgtttgtcgagcattaatactccgagactgacaagagatgagatatcttggttaaagacattgtctttttatacaagtgtttcgatggaaaacatattgcagatcgaagaactcatgaaccatttacaagacctgaaacaacaaggctcaaacccggtctggctcaaaaagctgatgtttacgatcgaggaaaagcagcgttcggatttggcccgtgatctgcatgattcagtgctgcaggatttgatttctttgaagcgccagtgtgagctgtttctggccgattttaagaaagaggagccttgccagttagaggtgcaggacaagcttcatcagatgaatgagcagatgtcggatgtcattttgatgacccgggagacgtgccatgagcttcggcctcagctgctgtatgatttgggtctggtcaaggcggtatccaagcttgccgcgcagcagcaagagcgtgcgccgtttcatatccgtctgaatacgggccggtttacggcggcgctggatttggatacgcagctgaatttgtaccgcattattcaggaatttctttcgaacgccatgaagcattcacaggcgaatgaggtgctgattatgctgatcagcattcaaaataaagtgattctgcattatgaagacgacggtgtcggctgcaatcaggaagaaggcggcggacagtcgatgagcatgggtctttcgggtattaaggagcgcgtccgtgcgcttgacggacggatgaaaatcgacacaagtgaaggaaacggttttaaagcggatattgaaatggaattgtaaccattttatcaccaaatcgacttggcagaagccaagtctttttaataaaatggaaatgagtgagtaaaagggaggaaaccatgaaaaagatactagtgattgatgatcatccggctgtcatggagggcaccaagacgattctggaaacggacacgaatctttctgtcgattgcctcagtcctgatgccagtgaacaattcgttctccggcatgatttttcagcttacgatctcatattaatggatttaaatctgggtgatgacatcagcggcatcgagctttccaagaaaatcttaaaagagaatcctctctgtaaaatcattgtctacacaggctatgaggttgaagattattttgaagaatccatccgcgcgggcctgcatggcgccatcagcaaaaccgaatctaaagagaaaatcatgcaatacatatatcacgtgctcaacggacagattttagttgatttctcctatttcaaacagctgatgacccagcaaaaaacaaaaacgtcttcttcccctcaaagtgagcaggatcggttaaccccgagagagcgccatattctccaagaggtcgaaaaaggtttgaccaatcaggaaatcgcagatgcgcttcacttaagcaagcggtcgattgaatacagcctgacatccatttttaataagctgaatgtcggctcccgaactgaagcggtgctgatcgccaagtcagataacgtactataaatcttgaagggagaatgacctatgaatctgaacaatacattgctcggcgcactcggtattgaaatcactgaaaacacgccggagagatgcgtggcggtgatgccggtggataagaggacggtgcagcctttcggatatctgcatgggggcgcgtcagcagcgctggcggagactgctgcaagtgtcggggcccagcattttatcgaccggtcgaaacaggcgtgtgtcgggcttgagattaatgccaatcatttaaagtcagtgaaagagggcggaacggtcacggcgatagcggaacccgttcacacaggcagggcaaccattgtgtacgggattaacattttcgatgaacgagaaaggctgatctgtgtttcccgctgtacgctggctgttataacaaaataaacaaacagccggaaccctgaatcgtccggctgtttgtttttacaaatatgaatcttcttttcgtttgatcacaaagtttctgatccctttgtaatcatcctgaacgcttcttttatcaagcgccgctcccgaattgtacgcggccctgcatatgaggtgcgctccgaccggcgccgtcagcaggataaaaatgatgccgagcagtatttttacagaaatttctccggtcagcatccacaagtagcctaacaccccgagcaataccaaattaacgccgagtgtcgagccttttgaagaggcgtgggcgcgcgtatacacatcaggaagcctgagtgtgccgaaagacgcgaccaggcagatcagcgatcccatcagaatacaaacggcgacggcccatttaacgatttcgatcattttcgataatctctcctttctccaaaaacttagcaaaggcaatcgtgccgataaacgataaaatgccgagcagcagaatgatgtccaaaaaggccgatgtgtttaagagaatggatacaagcgcggtcatggcaatcagattaatgccgatcccatcaagcgcgacgacccggtccggtatcgtcggccctttcatgacgcgaatgacgtacagaagagtcgaaaccgccataatgccgagtgataattgcagaataaacgtaaacatcagcggctcacctcctgaatggctttttcaaaagagacgcggatgtcgtggatcgctttctccgcatcttcaatatccatggcgtgtatatagagaatcgaccggtcatcggagatatccatcacgagcgtacccggtgttaaagtgattaacagcgagagcaacgtgatctcccaatcctccgtcaattccgtcttaaacgcgaaaatgcccgggcggatgttcagtttcggcgctataacggttttcagcacgctgacattggccaaatataattcctttataaagatcagcaccagtctgatgactgaccatattttccaaatgtaaaacggccgcgagaagaagcgccggaaaaaaaacagcgccgccaagcctgcgataaatccggttataaaacccgccgtgctgaggctgtttgtgagaaacatccagcaaacagcgagaagaacgtttaataatagttgaaaagccatgccatctactccttcaaaacagcttcaatgtatttttccggattcagcagattctcagccgtctgattgacatacggtgaaacccattcggttccgagcccgaacagaagcgacaaaaggagaaaagcggctgccggataaagaagtccttttgcggaccgtccgcctgcgccggggatttctttttcttcgccccaaaaagccgtcgtaaaaaccttcagcaccgaatagagcacaagcaggcttgatacaagaatcaatacggaaaacaatgtttcccccttatcgaacccgccttccgcgatcttcagcttgcccacaaatccgctgaacggcgggatgccggccaaagatatggctgaaataaagaacatccatcctaaaacgggataacgggtgatcagtccgcccattttatgcaggctggcagtgcctgtcaatgcgataagcgtgccggcaagcataaacagcgctcctttaatcagcatatcgtgaatcaagtaataaaccgctccttgaatggaggccggcgtgttcatggcaatgccgaacaaaatcacgccgacggctgtaataatattgtagatgacgattttcatgacatccgaaaaggcgatagatccgattacgccgaatagcaccgtcagcatcgcaagccacatcatcaattggtgggtaaagcccgtatcgtgaataaagatcagggtgaatactcttaaaatggcatacaggccgactttcgtcaaaagagacccgaataaagccgaaattgcagccggcggggcgtaataagagcccggcatccagaaatacagcgggaatatcccgccctttaaaccgaaaacgacgagaagaaggatgccgatgacggttatcagcccggtctggcccgattcgcttatttttacgcttagatcagccatattcagcgtgcccgtcaccgcatataagtaaccgacaccgatgacaaaaaacgcggatgacacaatgttaaacacgatatacttcaatgattctcttaattgaattttcgttccgccaagcacgatcagcatgtaggacgcgataagcagaagctcaaaaaagacgtacatgttgaacaggtcacccgtcaaaaacgctccgcttacgccagccagaagaaactgcacccctgaataatagaaagcgcgctcccttttttctccgatggagcggaaggagtacagggtgacgagcagcccgattatggcggttgtcaaaacaagcagtgcggcaagctgatccgcggcgagcacaatgccgtacggcgctttccagccgccgagtgtcagcgtctgaatcccgtgtgtgaaaaccgtctgaacgagagcggcgctgatgacgatggagacacaggaagcggcagtgctgaatatccgcatcagcatcacgtgcctgttcataaaaatcagcagcactgcggcaagcagcggcaccagaataggcaatatcacaaagttattcatgttgatcatttcccctcattcgatccatatcgtccgttttcagttcctgataggcgcgaaacgccatcacaagcaggaaggacgtgacgccgaacgaaataacgatcgccgtcagtatgagtgcctgcggcagcggatcgacaaaggacgtgctttttccgcccagtatgggaggagcgccttttttcagtccgcccatggtcaggagcagcaaatggacgccgtggctcaaaagcgcggtgccgataatcacgcgcagcagacttttagaaagcagcaggtaggttgccgccataaacaaaataccggcaatgacagacattaagatttccactattcttcctctccaatcgtttgaataatggtcatcgtcacgccgacaacaacgagatacacacctaaatcaaacaaagtggccgtcgcaagctccgtattcccgagcaccgggagatgaaaatggccgaatgtatgggtgagaaagggcgctccgaataagaacgaacctgcacccgttgcaatcgcgataagcagacccgcgcccgccacataaataaaattgacgggcaaaatcgatttgacggtttttaaatcaaaggccaaaagcagcagcacgatggccgaagacgtaatcagtccgccgacaaatcctccgccgggggcgttatgccccgataaaaataaatagaaagagaaaagcagaatgataaaagatacaagcttcgttgccgtctgaaggatgatgtcgtttgtttttggctgtctcaacgcttttctccctcctctgttacttttgttctgatcatgccgtaaatcccgagtgcggcaatcgacagcaccgtaatttcaaacatcgtgtcaaatcccctgaaatcaacgaggatgacgttgacgatattgtttcctcccccgagcttatggctgtaagcggtgaaaaaggaggagatgctgtcttttgttttttcgctggaagacgcgattccgagcattgtcacgatgacgccgacaccgagagaaatgataaaattcgtcatccggaatgttcttgtcttctttttccgccgcattttcggcagatggtaaaaacaaagaagaaacaaggcgacggatatcgtctcaatgacgagctgcgtgagcgccagatcgggcgctctgaaaatcacgaaaaacagcgcgagtgtgtacccgacaacaccgagtgagataatggccgtcagccgtgatttggcgaacacagtcgcaatcgttgcgttcaccataacgagggacagcacgatttcatacaggccgatctcagccattcctttcgctgtcatggaaaagccgcctttcatgacgaacgccgctccgatgagaatgataaacgacgcaaagatatacagcagataatcccgcaaaaatccggtcatataagatgacgtcagctggtaagatcttttttccatactgcccgtcaccgcatcgtaaagcttgttcagcgtcagttttttcggaaacagaccgtacagacgctcccatttagacagcgttacgtaaccgatcgtgccgacaatgatgatgccgagggtcatcattacctcagccgtcaccccgtgccactgggaaatatggacatggaatgtatctccgccggttaacagagcgggataaatggagttcatcgccggttcaatcaggctgtaagacaaaacgttcggagcaaaaaacagactgacggcgcaagcggcaagaatcaccggcgaaatcagcatgccgagcggagcttcatgcggcgtcttttcaagctgatccgttttgcgcgcgccgctgaacgttctgaaaaacagcttcatgctgtagatgaaagtgaagacgctcccgatccatgcgagaacggggaacagcacgccccacgtatccaggctgaaaatatctgcatgagcaatccgcagcatacttgtaaagaacatttctttacttaaaaagccgttaaacggagggagaccggccatggaaaacgttccgatcagtgaaacggtgaacgttaccggcatgagcgccatcaggccgccgagcctgcggatatcccgcgttcccgtttcatggtcgataatgccggccgccataaataaacttcctttaaaagtagcatggttaattaagtgaaacacagccgcggtgacagccgccgtaaaatactctgaatgctcataatgaagcgcggcggctcctgcgccgagcatcgatacaatcataccgagctgactgactgtggaaaatgccagaatcgcttttaaatcggtttgtttaatcgcattaaaggaagcccataccatcgtgatcagaccgactgaggcaaccgtccaaaaccagacgggtgaaaaagcaaaaaccggactgaatctggcaatcagataaatacccgctttcaccattgtagccgagtgcagataggcgctgacaggagtcggcgcctccatggcatcaggaagccagatataaaacggaaactgcgctgattttgtaaaggcccccaataacaggagaaccatcgccggaataaagaacgggtggcctgcgataatatgcacctggttgaccatttccctgatactgaaagaatccgtcatcagatacagcaggataaagccgccgagcatgcacagcccgccgccgacggtaatcagcagtgatttttccgccccgtagcgtgatttcttccgcttatgccaatacccaattaataagaaggatgacaggcttgtcagctcccagaacatataaagcacgatgacgttatcgacgagcacaacgccgagcatcgcgcccataaacatcagcaggtacacataaaaagggccgagcttttctttgtccttcgataagtaaaaaatactgtaaagcgtcaccaaagagccgatgcccgtaatcaataaagcgaataacagcccgagtccgtcaatataaacggtatagttaataccgagggacggaatccattcggccgcataccggacggtttctccagccattgtgacagggagcttgctgataaagtaaacaaacagcacaacgggcactatcagcacaaaccagcctgtatggacttgttttacccgtttataaagaaagggaacgataaatgcaaataaaaaaggcgccaaaatcgcgaaatgtaacagctgcaacagaagacctcctttgcttgttttttcatcaagcaactgctttatgtaagaatgaatcaatcaattcacggtcataggacccagtacaaattatatcgcacttttttttaccctgctacggcataatgtattcctctttgtgtttttgtggtcttttgaacccaaaataaatttatcaaatatccggatctttgtatatacatttctttttcagatcaagctttacaaaaggagctggtcagatgaagagaaaggcggcggcctgtattggaatattttgttctattattgcaggaacattcatagttgatgatttctgcaaaacgcggcagcagacggaagcagatgattgggagcatttttttctcggtgcggaatacgcagaagacaagctgagtgcggctgaatcaatgcaaacgccgtttcagccgcgtgagtatatcagaatcgtatatagatgaaaagagttccggcaccagggtgcggaactctttttgtgtggcaatcagcgttttcctttaatataagggatgccgttggctttaggcgcatccgcgcggccgatgaagccggcaagcgcgagaatggtcagaatgtaaggagccatcagcatgtatacattcggaatgtctttgaacaggggcaaaagcgagccgataatgctcaaactctgcgcaaacccgaagaacagcgcagccccgagcgcgccgatcggatgccatttgccgaaaaccagcgcggcgagagcgataaagccttgtccggaaatggtggagtgcgtgaaatcaagcgcgatcgtggaagcatacacaccgccgccgagcccgccgaacagcccgctgatcatgacgccgatatagcgcatgccgaacacgttgattcccatcgtatcggccgccatcggatgttccccgacagaacggatgcgaaggccgaacggcgttttgaataaaataaaccaggaaacaaaggccagtacgatggctaaaatcgacgtataatatacgtctgaaaagaaaatctttcctaaaaccggaatatcgcttaacccgggaatgttcgttttgtaaaagggctccgggattttatcagtctgcgcctttccgtaaatcagtttgacgataaacagtgtcgctcctaacgcgagcatattgatcgccacaccggttaccgtctgatcggcgcggaaagaaaccgcggcagccgcgtggatcagtgagaacagtccgccggcaatcatagccgcagccagagcgagccacggagcggcggcgccaagctcgcgtccgaaaaataagttgaacatgacgcttgtaaaggcgccgataatcatcagtccttcaagaccgatgttgacaacccccgatctttcagaaaacacgccgccgagagcggttaaaataagcggagccgcatatacgagtgttgccggaacaataatggataaaatctgcaggaagtccacttacttcgccccctttttcttcaatttatcaaggatgagacggatggcgtagcttgatgccacaaacaaaataataatggcgatgacgatgtcaacgacttcagaaggcaccccggattcaatcggcatatttaatgccccgactttaaggccgccgagaagacatgccgccagaacaacgccgattgccgtgctgccgccgagaagcgcaaccgcaatgccgtcgaagccgacgccggtaaaggcgcccttaaccgccgcatattgaaaggttccgagtccttccatcgcgccggcaagccctgcgaaggccccggaaatcatcatggcgtacatcatattttttctgacgctcattccggcgtattgtgcggcgtgctggttaaagccgacagcccggaattcaaatccgctttttgttttatgaatgataaaccacatgaggactgccgcaaacagagcgatcagaatgccccaatgaaggcgggagtaatctgtcagctgctctaaaaacggcgagcggagcgacgcgctttcatgaattttgtctgttttgtcccggtggtccgtcatgacatcggaaatgagataattggttaaatgaagagcgatataattcatcatgatcgtgacaatcacttcgtggacaaaaaaacgggcttttaaaaatccgggaatcaggccccaaatgccgcccgcagccgcagccgccaataacgaaagcggaaggtggatgtaagcgggggcgtcaaaggaaacgccgacccacaccgcggcggtccagccgacaaggagctgtccttcaaccccgatattaaacaggccggtccgaaatgcgaatgccacggccaatccggacagaatatatggcgtaatctgccggatcgattccccgatgtaatacacttcaccgaaaatgccgctccaaagagccgaatacccgcttacgacattgtagccgctggcgagcatgatgaccgcacccgcagctaatccaaggatgatcgcaatcagcggcacagccagatgagaaagtcgattaatcatgtgttttccccgcctccatttgcttacttcccgccattaaaagtccgagctcctgctcgtttgtttcaagcggattgacgtttgcgatgatgctgccttcaaagatgacggcgatgcgatcgctgagattcattatttcatcaagttcaaaagataacagaagcaccgctttaccggcgtcacgctgctcaatgagctttttatggacgaattcaatcgcgccgacatcgagtccccgcgtcggctgggccgcaattaaaagatccggatttctgtccacttcccggccgataatggccttttgctgattccccccggagagagcgcgcgcaggcgtatattcatcaggtgtcctgacatcgtattcttcaatcaggcttcgcgctttgtcataaatcgtgtgtttatttaatatgccgaaagaagagtagggcttttggtaataactttgcagcacgatattttctccgatcggaaaatcaaggacgagcccgtgtttatgtctgtcctgcggaatatgcccgattccggcttcagtgactttcctgggcggcatattttgcagctgtttgccgtttaacatgatcgtgccggcatttgtttttctgagacctgtaatggcttcaattaattcagactggccgtttccgtcaacgcccgcaatgccgacgatttcaccggctctgacagagagggagagctgtttgaccgcctcaacgccgcgcgcgtctttcaccgttacatcagaaagcgaaagcacttcttgtttcggttcagccggctgtttatccgtcttgaatgacacttcgcgtccgaccataaggcttgccagttcatcttgatccgtatgtgcgacatcaagtgttgtaatgccttttcctttccggatgatggtgacacggtcgcagacttccataatctcttttaatttgtgggtgatgaggataattgattttccttcattgacaagatttttcataatctgaatcagttcttgaatttcgtgcggagtcagcaccgcggtcggctcgtcaaaaatgagaatgtcggcgccccggtagagggtctttaatatttccgcccgctgctgcataccgacggagatatcggcaactttggcttcaggatcaatgtgcaggccgtaacggtcggaaatatcacgcacgtcccgggcggcgcgctgtctgtcaattcggccgaaagttttcggctcttttccgagaatgatattttctgagacggtgaaggtatccacaagcataaaatgctggtgcaccatcccgatgccgagatcgttggctttgttcggactgttgatgtgaacgcgttcgccacgcacccggatctcgcctttttccggctgatacaggccgaataaaacgttcatgagtgtcgattttccggcgccgttttcaccgagaagggcgtgtatttcgccttttttcacttgaagcgtgacgtcatcattggcgacgattccgggaaattccttgcgtatattaagcatttcaatgatataatccaccgatttgtcgctccttttcagagatactttgatgagaaagagcttggcaaaagaaaagctgcaagagatgcagcttttccttcaccgctcttttcaaaaaagagaggggataagcacgaaagtctccttatcccctggttcttactcagccttgaaggatttcaattctttttcagttgaagggatcacgagtccgtccgcgattttcttcttccaatcgtctgttgctttgatgacatcgtcagaaaggttctccttgtgatccgagatgccgactgcatcttgcgccaaaccgtatgttaatgttttgccgcccgggaatttaccgtcactcgcttttttcgttaagtcctccacggcagtatccacttttttgaccattgatgtgagagtgacattgtcttttgttcctttgacttggccttccgcgtactggtctttatcgacaccgataacccatacgttccgcttcggatcttcttttttcagatttttcgcttctgtgaagacgcccgttcccgttgcgccggccgcgtgataaatgacgtcaacgcctgatttgtacatgctttcagccgtcgccttgccgacatcggctttgtcaaacccgcccgcatatttcacttcgacggtcgctttcggatttgcggcttgtacacccgcgcggaagccgatttcaaattttttgatcaattcggactccattccgcccacgaatccgacttttcccgttttgctcgatagcgcagcggccgctcccacgaggaatgaaccttcctgttccttaaatgtaaggctcgccacgttgtcttttttgacaacggcgtcaatgatcgcaaaatgtgtgtctttgcgctgatcggcgatttcgctgatggaatcctgcatcagatacccgacgccgtaaatcaggtcaaagtgttcccgcgctaatttatttaagttcgttgtataatctgcatctgattttgattgaagatagtcaaaaccgcttttgccttttttaagcccgttgtcttttccgaatgcctggatgccttcccaggcggactggttaaatgatttgtcatcaacaccgccgatatccgttaccatgccgacggtaaagtttttgctgccggagccgtttgctttgtcacttgaaccgcatgcgcttaatatggttccggccgctgcgatgagcgccatcgccattccgattttgcgttttttcaaagatataacccccctgtaaaatatggctgtgccgttcaattcagacttgagtccccgtgccggatgcagaatcgaaaaaactttctgataataatgatgagacgtctctctttttcccgccttgagcggctgtctcttccgggttcgggacttatgacttatctgaaaagatctgctaaccaatcataatttatcattttacccgccataaataaatagaaatttgcttattttttaaaaaatatcaattttatgaatcggcttcctcatctggttaaaacagaggaggatcagccgggtcattatccttatatagcatatcaaaaaggaatctcaagccttttgtcacgggatatgacagtaaaaaagcaccgttcacagcgaaacggcgctttttgacattataaatattgtttgatgctgctgacattgccggtgttgatatgatattgaaagacgggtctgccgatcgtgccgtacgccatctctacattcagcacttgtatgtcttccagaaatttaaggtatttccggatggagacttgcgagatttcagtatgcttggcgagatcttccgtggtaaaagagccgtcgccgaaagactcaatgctcgcccagatgagtttaagcgtgctctttgtcaatcccttcggaaggtgaaccttttccgccgcttctttcttttgaaaaagctcggcatccaattctttctgtgtcatgcttctgtgtgattgataaactttctgcttgcgtctgtagtcggaaagagcggtttgaaagcggtcaaattcaaatggtttgattaaataatcgacggcgccgtaccgaagcgtttttttaatgacgtccagctcgcttgcggccgaaatgacgatgacatcaaccgattcattctgcttgcggatttccgttaaaagctcaagcccgttttttcccggcatgtaaatgtcaagaaggatgagatcgatatgatgctcgctcagcacgtgcagcgcgctttgaaaggatgatgcgatccctttcagctgaaatccttcaatctggctgagatagcgcttatttaattcacccaccatggggtcgtcttcaactatgagtacattaatcatcattttcctccttcggttcatacggaatgcgaagactgaaagtcgttccttcattcttttcacttgtcacaatcatatggccttttaaattttctgttgcctgctgggtgaaatagaggccgaacccccggtttgtccctttcgtggaataaccttgttcaaaaatacgggcttggtctgccgcagacattccggctcccgtgtccgtaatctctatgtcaagctggcgatcctgaaaccgcatcgagcacgtaatgttttttttcggcatctgcgccaccgcgtcgagcgcgttgtttaacaggtttccgataatcgtaatgagctcatggatgacggccggatccgccgcattcggaatcaggctgccgagctgaatgtccagatcagcgccctgctcgcgtatgtagctttgttttcccagaagaaaccctgcgagaaccggacttttgacatcacttataatctcgcttgtttccgtcttctgctgaatggcaatgtctttaatgtaagtgccgagatcatcgtattcttttaactggacaagccctaaaatgacatgaagcttattcatgaattcgtgagactgggctcttaatgcgtttgcatacattttaacaccggacagctgttctgctaaatgtttgacctccgttttgtccctgaacgtggcgatcgctccgacggtttgtcctttcagatgaatcggaacttcattaaagaccagctcaagtccgttaatgcggatatctctgtcctgaagcggttttttcgtttcaatcacctgtttcagccggcttttcgggagaatatcgttcacatcttgatcgaccggattagtcggaatacccattttaataaaaagtcgtttcgcctctgcattggcaagcttaatttttccccgcgcgtcaaccgcaaggatgccttccttcgttgattcgagcatggcgctccgctcttccaggagggtggcgatttcataaggctcaagaccgtacataatgtttttgacggtgcgggcgacaatgacggctccgatgacgccgacaaaaatacttacgcagatgatgaaataaagcggtctcaaactgtggctgacgacatcctgtattttgttaagcgaaattccgaccgaaacgacgcccacttgttttttatcttttccatagatcggtacgaaggctctcatggattttccgagagttcccgctgatgtgctcgttttgatatggccgtgcaacgccggctgttcgtctccgccggtgaatttcttcccgattttatttgcgtcggggtgggtgaggcggatgctgttcatatccatcaccacgacaaattcggttcctgtcgtatgctggacatccagtgtataattccggagctctttcagcccttttcttgtttgcaatgcctgcgcgacactcggtgtttccgcgacaagctttgcggtgcgcagcgcggttgtccgttcttcttctttcacgcggtccgcggtctggacgctgatcgtgaaaaaggtgatacaaagtgcgataaggacgacaatacagacgaatatcgttaaccgggtttgcaattttaatgtttttttcataacagccttccttacgtttatcattcccgcgttctactttactccgaaaaagccggtttgtgaagatcaggcccttatttcgtaaaagtgaggaaaaatggaattttttatcttgtcaatgtgttttaagtcctccataataagtgaggtagattacagaaagggactttttatatgaaaaatacttattggacgggttattttccgctcgttgcgattctgctttttagttcgtcattatccatttctacctcgctttatgtcatgaagatacttcagacgctcggcatgtatcaggggatgctggattatttctctgagaaagggatcagactggcgctttttgcagcgttcgcccttgtgtattttatgcttttttcggctttgaagctgattgcaaacacagtgacagagctgtctcttttgtttttcacaaatgaccctgagggggacaatctgaaaaaaatcagattaggctctttaatttatgtaggcggaggaattctttcctttgcgttcgtgcagaatggtttttggattgcggcgttatttgccgttgttacgctcatttatttgattttcatggtgtacagaatctattcgacactctcgatcgtttcgctgatcggttttatattgcttgagattctgttttggtttacttttgttatcggtattttgtacatctttatcaagctttataatagcataatggctagcttacctgtgtaagctagccatttttgttaagacagaaatctgtttttgatctcaggggaggggagcatgcatgcttccctttttccgaaccatttgtaacggcgccgggcgatgaaagaataggctctgtccctgagggggcggggcactgcgaaaaaaaccgctgacagccgccaggctccgcggagatgacgcgaaacctttaacacggctgcggattttttgtatatccgcccgttttcgataaaaatcatgctgtcaaattgttctgtcggaagtccttctgatgccaaaagctcccgggcggtatctgattgcaatgaagcaaatgagattttgccggccggatcgcgtttaatgatgaattgaacggcgccgctgcataagttgcagacgccgtcaaacaaaagcacgcggtccggaagctgagctggtttcaaagcggatcccctccgttatctttaataagctgcctgcagcgtgtttttccagatcgaaagctgagggcttgcgtcatgaaggtattcgacgcttgacggtgtatccttgccgacccatacccccatcgtataagcgtccgtcaggccgacaaaccacatatcgtgatagtcatttgacgttcctgattttccgccgacgtacggagctttaaagttcgctttttttcctgttccgcttttgacgacggctttcatcatttctttgatctgcatgttggtccgcacgctgaatacctgcgccggctcatctttccattttaatatcgtttttccttttaaatcagtcacttttgtaatcgcgtgactcggcgtataaacgccgttgttgccgaacgtggtgtacgcattggtcatttcaagcggcgtcatgccgtttgtaaaaccgcccagcgccgcaggcaggcggtaatccgcgctgaccagcttcgcgaaatgaaacggttcaaggtagctgaacgccttattgacgccgacgcggtccatgattctgatggccggtgtgttgtacgagtatttaaacgccgtttccagcgtaaccgtgccgtatgtgcggttattatagttctgcgggcagtaatccgcactgcagaatttgcttgcgtcaattttgctgtgtggcgttgcgccggtcttttcaatgtaaggtccgtaatcaagcagcggcttaatggatgaaccgggctgtctgtatgcttgataggcgcggttgaaatcatatttatgataatctttcccgcctgaaagcgcgataatctgatgtgtctgatgattaatcacggccgctccgccctggacgcctgcatacggcagattttgattcacttgggcgacgacctggttttgcatatacggattcagcgccgtataaatcttcacgccgtcttttaacaatgtgctgactctgtcggaaagctcactctgtattttttgtttcgcctttccggaagctttttcaagacgtttgtcatagccttcggatgaggaaacaagctgtgtgaattcatcatttacataggaaacatagtcaggatatttatttgttttttcgtttatatcaagcttgatcttttccttttcggcttttttcagctgtttcccggatataacgcctgcttttttcaatccgttaagcaatctgacttgtcgttttttcgtataatcaaaatgcttgagaggatcatataatgtagggttattagggatggcgcagataaaggccatctctcccaaagtgagagatttcagcggcttgctgaaataaaattgtgccgccgaaccgacaccgtatacaccgttattaaaataaatcgtatttaagtagccttctaaaatctcatctttgctgtattttttctcaagctgataggaataggccagctccgtcagttttcggctgaaggtgcgttcatggcttaaatacacattccttgccagctgctgggtgatggtgctggcgccctggtcaattttatgatctttgaaattggaggcggccgccctgaccatccccataaagtcaaaccctttatgctcataaaaatggcggtcttcagaggttaaaaacagctgttttacctcattcggtattttattaaagggcacgatcacgcggttctcatgatcgctgacaatctcagaaacaaggcttccgtccctgtcatacatgtaactgttttgaaccaggttgatcgcttttaaatcaatatgtttatcgagcacctgatcaaaaggcttgatttgttttacctctttgccggaagcaataactgtaaatgcacacaacgggataatgccgagcagcaaaatccatccgattattttacgtaccatggtcactctcttttctcctgatttctagccatatcgtatcattcttttaagaatacgagaaggttaaatttagaagaaatcgtgatcgctgccggtcagcccgcatttgacgctgtatccttttgcagatgtcccgccatccataaaagccccgcgcctataaaaaagagaaaggcggtgacgtagaaagcagccgaaatagaaaaaccgcttgagaccgcacctccgagcagagggccgagcacgtttccgagaaaacgaaagctgacgttatatccgagcacctctccctggatgctgcccggagccctgacgcggatcgcggccgtaatgcaggggagcgtgccgcccatgaccatgccgaacagaaatctgaagactaacagaatggagagggaggaggcgagcgcctgcggaataaaaaacaccgctgatgcaatcaaaagcacgattaagatccggctgtggccgaagcggtcgccgaagtccccccatttccgggcaagcaataagcttccgagtccggtcgctgaaaacgccattccggagaaaaaggctaaattaacaggtccgtgcagctcattgacatataaagcgagcagcggctggatgctgaaattgccggtctgcacgatcatggtaagcaccatcatcgcccaaagcgcgggctggtgaaaaatataggagagcacctgttttctggaataggttttccgcttgttttgtttctcgccgagcggctgctcattcacctgaaataaaacgagaagcacagatgcgaaaatgacaaaagacgtaataaaaaatgtgtacgtaaatccgaagctgtcagcgagcagcccgcccagcatcggtccgaataaagtgcctgacacctgacccatctgcagcgtgccgagcgttttcccggcagtctctttcggcgtctgcgccgaaatcatggcaagcgaagtcggaacaaagcccgttacaaggcccataagcagccggaggacaaacagctgataaacggatgtcacaaaccccatcaataaaatgctgacggcaatgccggtgcctgtgatcaagagaatttttttgtagccgcgcttatcgccgaatctgccccaaaacggggaaatcacaaacgccattaaaaacgtgacgccgaacacatacccgctccatctctgcacatacccgcccgaatgggggctgatcgtttcgatatataacgaaagaaacggaacaatcatggtcatgctggcggaaataaagaaatttgtaatccaaatgacgacgaagttcttcttacggacagaaataacatcaccttctttaattttcgtgtgtctaatcattagtatataggaatgaatccggtatttgtattttcgatgcggatataggaaaattcattatttttagaaaatgaagaaagtttcagaggggaaactgatatactatcataaaatatcatttttgatcggaggaaaggcaggtgtaaaaaagtggatcagcgcagtctgctcattattgattttgaatttacgatgcctgacggaaaatacagcccgcaaaatttctttcccgagattattgaagcggggattgtcaagacggtgaatgatgaagtgactgaaacgttttcgagttatatcaaaccgaaaaaatttccaaagctgacgaaacgatgcaaaacctttctgaacatcacccaaaaagacgtggacggcggaatcacgtttaatgaattcatccgcaaattaaatgagcttgatcctgataaaaactgcacgatcgtcacctggggcaatatggatatgaaagtgttaaagcaaaattgcatgtttaaccacatcccttttccgttcaaaggagaacttcgggatctgtccctagaatataaaaacttctttggcgacagaacattgaccggcctttggaaagcggcggaagagtatggcgataaagggacgggcacgcatcataaagcgctggatgatgcgcggacgacatacaaattattcaagcttgtcgagcgggataaacaatatcttgaaaaaccgaaacccccgacgatcggtgatcgcgtcgatctgactgaactgtttcgacgggccacataaaaaaacccaatcatgccgactgggtcaagttcttttaaaatagtcacgctctaacgcggccaagttggcgagcgaacgttccgcccattctgagccgtccgctgtaagctgatctttcagccgggcagacgccgcttgtaaggaagccgtataatcaggaacttcgccatcaaacggtttgaccatctgatgcggtatgtttgtctgttccccgaatgcaagcgctcttctttcatgaaagaacggaacatccgcctgcttcggatgatgaagatctccttgagcgggatgcgtcagaacggctttaattttcactaaatagtgattgggcctgacgtctgtcacttcccctatgtatgctcctgttttataaaacccttttacgattgtgccgatttcaaacgaattcatagcgttcacctctctctagttattctataaaagatcaacgcgattggctagtgaacagctgccggaagcctgactgaagccgttgtgcccgagtgctcgccgctggtgaaatagacggagccttcatgatgctgaataatcgagaatgtcacggtaagcccgagcccggtgccattcgttttcagcgtataatacggtttgccgagtttctgcagttcttcatcggacatgccgattccgttatccgtaatctgaatgagaatcatctcttcctgtttttggacggagacctcgattcggccgttttcagagggcacggcttcaatactgtttttaatcagattaatgaaggcctgtttcagtttttttacatcgccgaacacatataaatcaggctcgctttgaacagtcacggtcaccgatttaaaattagcataagactccattaaggaacctgtttcctttacaagcagagaaatatcaaacttttctttttcatagtcatcctgcttcgccatatcgagataattcgtaatgatcgtctgagcccggtcgagttcggacagcacaagtttctgatatccggagtgggatttgtcctgaagctgctcgccgctgaacagcagctgcacaaaacctctgacgaccgtaagcggattgcggacttcatgggcgacgcttgccgcaagctcgctgacgacggccattttttctgagtgaatcagccttgcccgcatggacgcattctcatcaatgatctcaatcaaataaatgcacagcaaaagggcgctgacttgaaaaaaaacggatactgccgcctcataataaacggaagatagattttgaaaattgaaaatattggtcgcggaatagatgaagacagatgcggttaataaggcggtttcagtgcagccgatgagaagagcgaaaagcagtttcttccgctttgagaaaaaaggccatttcgtttggagctggatagggatgatgattaaaaaaggaattaaggataagaaaaaaagagcggaaggttcaaaccatatgagctgaaaaaaaacggatgctgcccctgcggcaagtcctgctgcggtaccggaataaagcaggcagacgataatgggaatcagctgcaaaccgtaacggacggaatgaagctcctggatgggaaaagccgtacataataaggaagatgacgctgcaaatacggcgaccagcaggcggttcgctctcggcacaagcaaatcgggcttgctgagccagaagacttgatagagaaaaatagggaataaaataaaagagaagtgaagcaggtaatcctttacaatctccatttatgcgaaatcctttcctatgtaaatatgaatctattataacatctttaccggcaaaaaaagtatttatttctctaaagcgaacgcccttatctcatctgataaaggcgttctttccgctgctaagagagcgctgctttcattctcttaagcccttcttttacggcggcggctgaacagccgacattaagtctcataaatccttcgccgcccggtccgtatttcgttcccggctctaatatgattttcccttttttgagcattctttctttgagctcggcatccgaaaatccgtatccgctgaaatccatccagatcaaataggaagcgtcaggtttcatcatgcggactttcggcaattcttttcttaaaaagtcctcagccaatttcatattcctttcaatgtaaggaatcagtgcgtcaagccaagggcctccctttgtataagccgcttcgattgctgcaaccgcaaatgtgttgaggctggaaatcccgttctgatgcaatgcggcggagaatttcgcccgcttataacggtcgggaatgataatggcggatgcctgaatgccggcaatattaaacgtcttgctcggcgcgacacaagtaatggaaatccgcgcaaactcctcagacagagaagcaaaaggcgtatgcggctttccgtacagcatcaagtcggaatgtatctcgtcagaaacgacggtgacgttatgagcggcgcacagcgatccgagctgcataagctcatcccggctccacgctctgccggacggattgtggggattacaaagaatcatcagcttgacctcagaatcgctcagctttttctcaagatcctcaaaatccatgcagtagacgccgttctcttcccgtaatgggttatgtaaaacctgccgtttgttttccttgatcatctgataaaaaggcgtatacaccggtgattgaatcaacaccggatcgcccggttcggtaaaggcttgtactgccatgctgattgccgtgacaaccccgggactgaacgtgatgcttgcgggatcgggccggtagccgtgccgtgtctcaagccatgaagcgacggcttctcttgtgttttcgtcaggagacgtataaccgaatatgccgtggtcaaggcgggcttttaaggcgtcagtgaccgcttcgggagcgcggaaatccatatcggcaacccacatcggaagtgcatccgatacgccgaataacgcttccgccttgtcccatttcaccgattgtgtgccaagacggttttctcgaagatcaaagttcatgtatgtcactcctgtagtatcattattttgcacagcgtatctatgataaaatagatttgcaaactttattataagcggtgatgaaaatggaagaaagccaagcggtcatggaaatgatgaaaatcattgccaagtgggacccatttaaatatggagaagatttttatgagacagaagccgtcgacatcgttcaggccgtctacagtgaagaccgtgccgacaagctggcagcagccattcaggatatctttgaagcttcatttgagcaaaagctaccgatcgaaggctgccaaaaggccgccgagcagcttctgttcataaaagaaagcagctcctgcaccccttaaaaaccggcggttccgccggttttttttattgaataaattcaaaaatccgttccgaaacaaactccgggcgctcttcgggtacgaggtgtcccgtatccttgagtgaatacagaatggaatccggcaggtcgtcatgaagccgttttccgactgagaccggaacgacccggtcttcttctccccatattaaaagagcggggttttgcactttcttcaaatcctcgggctctaaatcgccctccctgtgtctgatgaaccttgtcatcgctttgaaaatctggcggtctgtaaatggtttttcgtaaccgtcaatcatttcctgatcgataagcgtccggtcgtgaacgacatttaacaggtttttcagcacaccgtcttttgaaagccaatacttaagatacaggtcaaaacaagggaggtgcgtcccgaatataatcgacgggtgcgagcgctttaaataccccgagctgcacagcaggacgattttagaaaaaagctcgggtctgagaagagacgcggataaggaaatctggccgcccatcgaatggccgatgagtgcggcccggctgataccgagcttttccagaagtccgatcagaagcttggcgaggtttgcgtaagtatatacgaaagtccgtgacttttccgattgcccgaaaggaggcaggtcaacggcgataatatcataatggtttctgagcagcgggatcagttttctgaagctgaatgccgaagataaaaaaccgtgtacgcagacgagtgtctgtctgccgggattttcataatgctcgtaatacagttcaactccgtctatcgcggcccgtttaatcggtgaaacagcttccatgagagccttcgccgtcctttctttgttgtaatgtaaaggcttttttgattgtcagattttagttctggtttctttcgggtttttcttagcatttgtcgaaaatcgtgatataatgtcatgaagatttttgataatgcaaaggtgtgaaacgtatgaagctgacggaaaaagaaacagaaatattagaaattttagacgaaaacagccgcgttgatgcggaaacgatcgcgaaaatggcgaacattcccgccgaagaagtcaaaagcatcattgaaaagcttgaaaaggaaaaagtcatcattgattatgcggcgatgatcgactggcgcaaagtcgacggtttggaaggcgtcacggcgatgattgacgtaaaagtcactccgaaacgaaatgtcggctttgatgaagtcgctgaacggatatacagattccaggaagttgaatcagtgtacctgatgtcaggggtgtatgacttatctgtcgttattcgcggcaacacgatgtcagacgtggcaagcttcgtgtctgaaaaattgtccacccttgagtccgtcgtttccacgacgacgcactttatcctgaaaaaatataagcatgacggcaaagtctttgaaagcggagacgatgacaaaagaatcgtggtgtctccgtaaatggaaacgaagacttcttatttatctgactacgtgcagcagattaaaccgtcaggcatccgcaaattctttgatctggctgctacgatggaaggcgtcatttcactgggagtgggagagcctgactttgtgacggcctggaacgtgagggaagcgagtattctttctttagaacagggttatacggcttatacggcaaatgcgggtctttatgaactgagagaagaaatcagccgctatttagatcagcggttcggcctgagttattcgcctgacagtgaactgattgttacggtaggggcaagccaggcgcttgatctcgctgtccgcgccattatgaatcccggagaggaaatgttaattcccgaaccgtgttttgtcgcatatgaatcactcgtgaccctgacgggggcgaagccggtgccgattcagactgtagctgcaaaaggtttcaaagcatcagcagccgattttgaagcggccctgacggacaaaacaaaagcgctgcttctatgctcgccgtcaaatccgactggttccgtctattcgaaagaagagcttgaatccatcgcttccttcgctgaaaaacatgacttgatcgtgcttgccgatgaaatttatgccgagctgacgtatgatgagccattcacgagcatgggagccatccgcggcatgaaggaacgcacgattttgatttcaggtttctccaaagcgtttgccatgacggggtggagactcgggtttacggcggcgcctcccgtgatcagggatgccatgctcaaaattcatcagcacgcgatgatgtgcgcgccttccatggctcagtacgcggcgcttgaagggctgaaaaacggtcaggaagacgtcgaaagaatgaaaaaaagctaccggagacgccgaaacctgattgtggaaacattgaacgaaatcggactcggctgccaccaccccggcggagcgttttacgcctttccttccattcagtcgaccggcatgagttcagaagaattcgcggaacagctgctcattgaagaaaaagtagccgtcgttccggggaatgtattcggcccgagcggcgaaggctacatcagatgttcctatgcgacatccattgagcagattcaggaagcgctcgtcagaatcaaacggtttgttgaaaaaagggcataaaaaaagatacgaacccggttcgcatccaaataaaagggggggaatactagaaagccttcgtaatcatagtataccccctttatctgcgcttaaacatgatgatgtaaaaaagttctctttgcgaaaaacaaacttgtatgatataattttaaattgcgtataatctgtatttaatttaacttaggagttgttatgaatggcagcaaaatttgaagtgggcagtgtttacactggtaaagtaacaggattacaagcgtatggtgcgtttgttgcattagatgaagaaactcaaggacttgttcacatttctgaagtcactcacggtttcgtaaaagacattaatgaacacctttctatcggtgacgaagtacaagtaaaagtacttgcagttgacgaagaaaaaggcaaaatcagcctttctatccgtgcgactcaagcggcgcctgaaagaaaagaaagcaaaccaagaaaaccgaaagcggcacaagtttctgaagaaacatctgctccgcaaggtttcaacacattgaaagataagcttgaagagtggattgaacagtccaaccgcaaagaccttatcaaaaaataaccatcaaaaaaagcaccggatatgtatgttcggtgctttttttatgtttatctgacttccggatttgccgcttcctcgcgggatgtttcttcgttcggcttaaacagcaggccgagattgatcagaccggcgatgccgacaagaccgtaaataatccgcgacagagctgatccttggccgccgaagatggctgctactaaatcaaattggaaaaatccgatcagtccccagttaatagcgccgataatcgttaatacgagacagatacgctgaataacactcatgtaaacaacctcctctataaattcgtgaaacagttatagattgtgacaaagcaaagaatctatgcatactacattctccgccgtgtaaatcacacactgtctcaagctgtacaagtgcctttcccgggaaaccgctgtctgtaaaccgtgtgatgtgccgtcaaaaaagcggattgctttacattgaacgtcaactttctgcataatataaatccaaaggaggagatgtcatgcaaaactttacatattggaatccgaccaaattgattttcggaaagggagaggtcgaaaaacttcctgaagaaatcaagccgtacggaaagaacgtactgctcgtatacggaggcggcagcattaagcgcagcggtctttatgatcaagtaaccgacctgctgaaaaaagcaggagttaccgtacatgaattggcaggcgtagagccgaatccgcgtgtctcaacggtgaacaaaggtgttgcgatctgtaaagaaaacagcatcgatttcttattggccgtcggcggcggaagtgtcattgactgcacgaaagccatcgcggcgggcgctaaatatgacggcgacgcgtgggatatcgtcacgaaaaaacaccagccgaaagaagcgctgccgttcggaacagtgctgacacttgcggcgaccggttcagagatgaactccggatcagtcatcacaaactgggagacacaagagaaatacggatgggggagcccgctcgtttaccctaaattctctattctcgatccggtaaacacatttaccgttccgaaagaccacaccatttacggcatggtcgatatgatgagccatgtgtttgaacaatatttccaccacacgtcaaacacgccgtatcaggaccggatgtgtgaatcgcttctgcgcacggtgattgaaacagcgccgaagctgatcaacgatctggagaactatgagcttcgtgagacgattttatatacaggcacgatcgcattaaacggaatgctgtcaatgggcgcaagaggggattgggccacacacaacatcgagcatgcggtatcagcggtatacgatataccgcacgccggaggtttagcgattctgttcccgaactggatgagacatgtgctcaaagaaaatccggcccgctttaaacagcttgccgtccgtgttttcgatattgacgagacaggcaaatcagatgaagagatcgcacttgaaggaatcagcaggctgtctgaattctggacgagcctcggcgctccgaacagactcgctgattacgatatttctgatgagaagctggatacgattgcagataaagcgatggcaaacggagcattcggacagttcaagtcactgcagaaagaagatgtgcttgcgatactgaaagcatcattgtaataacataaaggggggcggccggattggcagctcctttttttctgtgttatagtaattcccttacgatttttttggaggtcatgataaatggagaactttacgtactgcaatccgacgaaactgattttcggaaaaggtcaaatcgaccaattgaaaaaagagctgaagcaatacgggaaaaacgtgctgcttgtttacggaggcggcagcattaagcgaaacggcctgtatgaccaagtaacaggcattttaaaagaagaaggcgcagccgttcatgaacttgcgggcgttgaaccgaacccgcgtctggaaacggtaaataaaggaattgagctgtgcagacagcatgagattgatttccttctcgcagtcggcggcggaagtgtcatcgactgtacaaaagcgattgcggccggtgcgaaatatgacggcgacgcatgggacatttacagcaaaaaagtaacggcgcaggacgcgctcccgttcggcacggtgctgacgcttgcggcgacaggctctgaaatgaaccctgattccgttatcacaaattgggaaacaaacgaaaaattcgtatggggcagcaatgtcactcatccgcgtttctccattttagatcccgagaatactttcagcgttccggaaaaccaaaccgtatacggcatggtggatatgatgagccacgtatttgaacaatacttccacaatgttgaaaacacgccgcttcaggacagaatgtgttttgcggtccttcagacggtaattgaaacagcgccgaaacttttggaagaccttgagaactataagcaccgcgaaacgattttatacgcgggtacgatcgcattaaacggcacgctgcaaatgggctatttcggcgattgggcttcccatacgatggagcacgccgtatcagcggtttatgacatccctcacgcgggaggacttgcgattctgttcccgaactggatgagatacacgcttgatacaaatgtggaccgttttaaaaacctcatgcttaatatgtttgacattgatactgaaggcaaaacggataaagaaattgcgcttgaagggatcgataaattgtccgcgttctggacaagcctcggcgcaccgtcccgccttgcggattatgacatcggcgaagacaagcttgagctgatcgcagacatcgccgcaaaagaaatggaatacggcggattcggcaatttccaaaaactgaacaaagatgatgtacttgccatcttaaaggcgtcactgtaagatacattcccggccggagtgattttcaagctgcagatgtaaccgttttgggagtccctctttccggattttctattagttcattaggagcaagtgaaacacccttttccatgagacaactatggaaatcgtttcatccgtaaaggaccaattaactttgcgattgtctgtcatctatttacacgaaatctaaatcacgaagatgaagagccgcgaatttaaaaaaggggcgctgattcaatcagcgctcctttttatgcattttgtgtactaaggtcccgctgcgcccccatatagcttcccattaagttttgataaccgggaagatgactggagactaatgcgccaaaaccttcaacatcgttgcgccaatcacgctgaagctcgcatgctgtgctgaaccagttcataagctgcacgccgccatgagccatacgggttaatgatgcatctgctacttgcttattaaacgtccccgaagcatctgtcacaacaaacacttcgtagcctgctttaatggcagaaagcgcaggaaaagcaacgcagacgtctgttaccacccccgcgataatcagctgttttttgccggtcgcttcaatggctttaacaaagtcttcattgtcccatgcattaatttgtccgggacgggctatttttggcgcatcaggaaagagatcaacgagttcttgcatgagcggtccgttgggtccattttcaaagctggttgttaaaataaccggtaaatcaaagaatttagccgtatcaccgagagccaatacattgtttttaaattcatcaacgccatagtcacgcacgagaccggaaataaggccggtttgatggtcaactaaaagcacggcagaatcatcttttgaaagacgggaataaagatcagacattttatcatcctccttgaattaaggcaagtcagtttgtcaatggaaaacggtaaatctattcatatactgtataggtagaaagttatttctgaagtgacttttcgtgaaggtgatgatctttcaattaatccggaatgggaaccggagcatgatcaatccaatggatgaactgttgtaaatagcgttgaagataacgttttgtttgttcatccgtaagtatgtgttgagcggaatcaattttctcatggacttgcgaaatcagcattttttgaaagggcagaacattgacttgcatagcttcgagtacttctctcgtttgcatttgaccaaaagaggtgccgaaccctccgggggttgcgccgattaagccaaccggttttctgtttaaaacggaagaggtccgcggtcacgatgcccagtccaatgcattttttaatacccccgggattccggaattgtactctggacttacaatgatgacgccgtcaacgtctcgtatatcagctctaaaggatgttacggagtctggtgctccggccatttctaaatcttcgttaaaaaaaggaagagtgtctatttcaacccagcgaaattgagccgcattatcgaagtcaatcaatgattgagcaatcactcgattatacgagttttttcgtaaacttccacaaataagaccaatggttttagtcaaagaatcacctcccggtttaaaattattttcatcttaacatgataacccaaatatagacactatttttaaaaatggacatttataccttaatatgcctgcttagcagcctctcaagaggagtactatataaaaagaaccgtcccatcggtattggcgatggatgtcaacctgctccaaagtaaaggtgatacgttcctggatcaccaacattcgattcgttacctctttcacgattattacaaatataactatttcgaatccgggatattgtataaaaaatgagcgcatcttcagcgcaaatcccgtattcatcatgccttcttcatgacttgatttagcgggtgagttcatataaagtgaaagagaaaacaattcaccgtgatggagggacaagcaaatgacgcatgtacgctttgattactcaagagcgttaccttttttcaatgaacatgaacttacatacgcacgtgatttcgtaaaaacggcacaccataatatccatgaaaaaacaggcgccggaagcgactttttaggctgggtggacctccctgaaaactatgataaagaagaattcgcgcgcattaaaaaaagcgctgaaaaaatcaaatcagattctgacgtgcttctcgtcgtgggtatcggcggttcatacttaggcgcccgcgcggcgattgaagcgctcaatcattctttctataatgttctgccgaaagataagcgcaaaaaccctcaagttatctttatcggcaataatatcagctcaacttatatgaaagatgttatggatcttttggaagacgctgatttctctatcaatgtcatttctaagtcaggcacgacgacggaacctgcaatcgctttccggattttccgcaaacttcttgaagaaaaatacggaaaagaagaagcgaaagcgcggatttacgcgacaacagataaagaacgcggcgctttaaaaacgctttctaatgaagaaggcttcgaatcattcgttattcctgatgatgtcggcggacgtttctccgttctgactgcggtaggccttctgccgattgcggtaagcggggctgatatcgatgaaatgatgaaaggcgctcttgatgcaagcaaagacttttccagctcggaattagaagagaacgcggcttaccaatacgccgtcgtccgcaacgttctgtataataaaggcagaaccattgaaatgctcatcaactatgagcctgcgctgcaatactttgctgaatggtggaagcagctcttcggcgaaagtgaaggaaaagacgaaaaaggcatctatccttcttccgctaacttctcaacagaccttcactctctcggtcaatacgtgcaggaaggcagacgtgatctgtttgaaaccgtattaaacgttgaaaaaccgaagcatgagctgacaattgaagaagcggaaaatgatctcgacggcttaaattatttagccggcaaaacggtcgatttcgtcaacaaaaaagcgttcgaaggcacgatgcttgcccatacagacggaaaagtgcctaacttaattgtcaatattccggagcttaacgcatatacatttggatatctcgtttatttctttgaaaaagcggtggcgatgagcggttatctgctcggagtcaacccgtttgatcagccgggtgttgaagcctataaggtgaatatgttcgcgcttctcggcaaaccgggctttgaagagaaaaaagcagagcttgaaaaacgccttgaaaaataaaaagaagggctggccctcagcatgacgggtcagccttttttaaaccgtgaaaggtgtgatgatgaattgatgcggcttttatgtaagcatgtcttcatttccgtctgttccgccgctatcgtctattcggcactaaaactgtctcccgaatccctcttgcaaaccatcctgtttttcgctttccctctcggcttgtttacggacatggtccggctgaaactgaagattggccggatgcatacgctgatcacgaagtgctgtctctatgccgccgttttctatatttcaacggaagccgctctctccgcaattgtgacgtatgttctgattgaatgcgccgtcacctcttttcagcgtctgtctgccgctcccggttcttcccggacgccgtatgaagataccgcagagcggggacgctaaagacaaaaaggagcatatgcacatgatcagcataccatcttcacttgaaggtcaatcgtttttactccgcgaactggaacaggtgatgaaaccgatcggttataccatcggaggcggctgggagtatgaccgcgggttctttgattacaaaatttccgatcaggacggctatttatttctccgtatccctgttgaagcaaataagggacacctggatgaacggggggccgccgttacaatcggcacaccctttttgctgaggcacgtttatcagcaggaaacggatgatgcagcaggcggcggtgtttttgagtcattattcaaccaattctccgaaccgaaacggcgggatgcggcaattgaccgctcatatacagatatcggcatctcgcttgtgaaagagctggaagacgtcctgctgcattaaagagccaaaaacagatcagtatcgagcacctggtatgacaggggaggggtcagcatcggcccctcttctttttgtatgccgatgatcgtggtattccgtctgagataatagagcgcgcagtcatgataagatgagccctttagttcctcggggacgggaatgatgcgcacctttttctccagcgtcagatctgacagcgtttgcggtttggcaagctgcagcttgacccggtaatgctcaaacatcacccggctcgacaggtgtgatgtgcacagaatcttattggctcctgcgcgctcggcgtttttgacataccgttccgttaaaatttctacgatacaataaacagacggatgcagccctttgatggcgagaagcgttaataccgacagcatatcagcttcggattcatttttctgctggtccgctgtcagaatgacggtatcagcttccgtaatattcgccttattgagcgtgctgtcatcagcggcatgtccgcggatgaaatggacgttttcaataagcggaccttcccttaatgaatcatcaatcaggacgacagtttttgacggtgcgatgtgctgcagctctttcagcagcatatgcgatttttcgttccatccgataagaatgacgtgccccttgcctttaaaggcgaccttcccttcgacatagcggtgctgtttgctgaacacggctgaagaaagcgtggcgaaataggcggtcacaaaactcgctccgcttaatacaagcaccatgccggcaatctgcccgagcggcgtctgcggaacgtaatcgccgtagccgactgtggccaccgtaatgaccgcccaccaaaccccttcaaacacagacgtgaattgcttcggttcgagcatgtaaatgagttggccgaacaataaaatcaaggcgataatgatcagcccgatccgaacatataacggccatctcagccaggaaataaaaatacggtttgatttcattcgtccggctcttctttcgacagagagatggataaaatctgcttaataatggtgtttagtttttcgtccagctgttcctggccgtatgagtcacgcgcatgtctgattaaatcggccgtctcatcttcaaactgaatgagaggttcgtcgttttctgattcattatagagctggatgaaggcgtcaagcccttcgttcattctgtctatcgcattgctcagctgttctttctcgccatttgtcactttcatgtcgatcacacctgtatctttttttatacagtatgtcccagttcgtttgatgtctttcaaaaatcgccgaaaacatattcacccttattttttcatatgataaagaaagcggaccgaaaaagggtgagtcaaatgacggtcattcaaaaactgttggcggcgctggccggagcgcagctgcttgcttcggcggccgtattgcttattttcgatttgaatggatacaatcacatgtccggcggattttcatggcttgtttttgcaaaagagaccgcaggcacgtttccgttttacatcggaatggccgggtgtatcctcatcatgctcggaggattgattcctgtcagaaaaaagaagcggatttctgtacaggaaagcgggcaatcattaaaataatatataagcagatcgtacgatataagagaaaaaggaagaggataatatgctgtttatctttttaacaattgctgcattgggtttgtcgttttgggcacaatttaaagtgaaaagcaattttcagaaatactcagacgtggaagcctccagtcagcggacgggggcggaaacggcaagacggattcttgatattaacggtttatatgatgtgccggtagaaccggtaagaggcactttaacagaccattacgacccgacggagcgggtggtgcgtttatctgagccggtatattacggccgctccatttccgccatttccgtcgcttcccatgaagtcggacatgctttgcagcatcaggaatcatacggcgcgcttgtgctgaggcacaaaatttttccggtcgtcaattttgcctccggggtcgcccctctgcttttcttgggcgggatgctcctgggcagcttgaacttaatcggactcggcattattttgttttcggccgctgtttttttccagcttgtcacactgcctgtcgagtttaatgccagcgcgagggcgaagcggattatcgtgtcggaaggattcattcgcaacagtgaagaacacggcgtgaataaagtgctgaacgccgccgcgctgacgtatgtggctgcggcgctcgtttcattattcgagctgcttcgttttgtgatgattttcttaaatggtcgtgatgagaattaacacgaaggaggtggccccttaccgtttgcggtaggggtttttttgcttatattaaaactgattctcattatgctgttaatcggattaacggccatctttgtcgctgcggaatttgcgattgtcaaaatccgcggttcaaaaatcgcggagctggttgaaaccggagacagccgggcgctcgcggcgcacagggtgatttcaaatctcgatgaatatttatcagcgtgccagctcggcattacgattacggcgctcggactcggctggctcggtgaaccgacgattcagcggcttcttcatcctgttttcagcctgatcggaatgccgtcatctattacgcacgtcgtcacgtttattgcggcgtttatcgccgtcacgtatctgcacgtcgtcatcggagagcttgcgccgaaaacgatatccattcaaaaagccgaagctgtcagtctgtggacggcgaaaccgctcattctgttttataaagtgatgtatccgtttattaagctgttaaacggctcagccggatttttggtcaagctgttcggttttcattcggtgaaagaacatgaggtcgtggtcagtgaagaagaattgcggctgattttgtccgaaagctataaaaaaggtcaaatcaatcaatctgaattccgttacgtcaataaaatatttgaattcgataaccgggtcgccagagaaatcatggtgccgcgcaccgaaatcgccgtcatctcgcttgaacagtcagttgatgaagccatacatttgatcatcaacgaacggtatacgcgatatccggttattaaggaagacaaagatcacattctcggcattattaacaataaggatttatttaaagcgtattttctcggccgctccattgaattaaaagaaatgatgcgtccggtcatcagagtcattgaaagcatccccgttcaggagcttttgatccgcatgcagaaggagcggattcatatggcgattctcgttgacgaatacggcggcacggcgggacttgtgaccgtcgaagacatattggaggaaatcgtcggggaaatccgtgatgaatatgaccaggatgaaatgccccacatcgtcaaaaaaggcgaacaccattatgtgatggacggcaaggcgctcatagaagaggtgaatgatctccttgatatcgccatcgaaaatgaagacattgacacgattgccggctggctcttaacacaaaaaatggagctgaaaaatggtgatgtgtttcatgccgaagggtgtgaatttaaggtgctggaagcggaagaccatcatatccgcttcgttgagattaaaaaaactgatttctgagcctcctgcttttgcaatgaggctttttttatggaaaaaatgcttcttcgtcccgctccttcatatgctgtaaagaaaggagtgtcggtatgaaaacggattggtggaaaacggcggccgtctatcaaatttatccccgaagctttatggattcgaacggggacggaatcggcgatattaacggcatcagagcaaagcttcattacataaaagagttgggggcggatgtgatctggctttgtcccgtttttgactcgccgggcgcggacaacggctacgatattcggaattataaacaaattgccggcgaattcgggacgatgaaggattttgaccggctccttgcggatgtccatgcgctcggcatgaagctgattatagacctcgtcattaaccatacaagcgatgagcacccttggtttatcgaatcacgctcagcgaaagattccgaaaaacgggactggtacatctggagagacggaaaaaacggcaaagagccgaataattgggaaagcattttcggcggatcggcgtgggaatatgatcaagagaccggccagtattacctgcacctgtttgacaaaaaacagcctgatttaaattgggaaaacgaagcgatgaggcagtccgtttatgagatggttcgctggtggcttgataaaggcatagacggcttccgggtggatgccatttctcacattaagaaaaaagaagggctccctgacatgccgaacccggacggtctcccgtacgtcccgtctttcccgtatcatatgaatggggaaggcataatggatctcttaaaagagctgaagcgggaaacattttcgcgctatccgatcatgacggtcggcgaggcgaacggagtggcggcttgggaggcggctgattgggccggtgaagaaaacggcgtctttcaaatgatttttcaatttgaacatctcggcctctgggatacggaagatgatcaaagcatctccattccggcgcttaagcgcgtcttgtccggctggcagtacagccttgaaggaaagggctggaatgcgttatttatggaaaatcacgaccagccccgttccgtttcggtatggggtgacgaacggtttttgacagaaagcgccaaggcactcgccgtgatgtatatgctgatgaaaggcacgccgtttatttaccagggacaggagctcggcatgaccaatgtttcgttcccatccattgaagattatgatgacgccgcaattaaatatctgtatgaaaaagagacgtcccgcggcgttccgcatgaacaagtgatgaagatcatctggaagaagggccgggataattcacggacaccgatgcaatggagcggtgaggcgaacggcgggttttctgatgcttctccgtggctcggagtgaatccgaaccacacatggctgaacgctgcatcacaattgcaggatgaaacatccgtataccatttctacaaacggctgctcgccctcagaaaaaaacacggcgtattgatcagcggcacatatgaattgctgcttccgaatgaccggcagatttatgcctatctaagaaaaaacggaacaaaaaccgccctgatcatcaccaatctgtcccgaacccccgctttatacaggcatcccggttatccgcttgactccgattctctcgtgcttgcaaacgtggaaacagaatcgcaccgccatgtgacatccttcctcttaaagccttatgaggcccgcgtatatatatggtgaaaaacttcagtcccgaggctgaagttttttgtgatctgtgtttatcatcgcgatccgacaggaaaagacaaatacagaaacgaatatgggaaaggaagagaaaaagaaaggaggcattcatatgctgaaaaaattgcagattcaaacaaacaaaagggatgaaatgatcgacatcacacatgaagccgaatcgtttctccgcgaaacaggcgtaagaaacggtttggcgctcatatactgtccccataccaccgccggcattaccatcaatgaaaatgccgacccggatgtgaagagggatatgctcagaaggtttgatgaaatgtatccgtgggagcacgaactggaccggcatatggagggaaatacggcggcacatatgaaagcgagtacaaccggcgcctctcagcatgtcatcatagaagacgggcgcctgatactcggaacatggcagggcgtttatttttgcgaatttgacggtccgcgaaacagaacatgttatatcaaaatactggctgaaacggaggaaaacaaatgagtgagtggatgagtccgttatcattaacaaagcccgtcattcaggccccgatggccggcggactggtcacgccgcgtctggcttcggcggtatcaaatgaaggggcgctcggaagcctcgcttcaggatacgtcagcccgcaagcgcttgaaaaacagcttatcgagatgaaagagctgacggaccgctcctttcaagtaaatcttttcgtcccggaagaaagacagatgcctgaggcggaacttgttgaaaaatggaaagcccgcattccgagggcaaaagacgccaagccgttctctgatctgaaagaagaatggaatgatttcgcggaaaaagcggagcttctgatccgttacggagtcaaagcgtgttcattcaccttcggcctgccgccggaaaaaacggcggaaaagctgaagaaaagcggttgtttccttttcggcacggcgacaacgccggaggaagcgaaggcttttgaagaacggggaatggacgccgttatccttcagggaatagaagccggcgggcatcgcgggtcgtttctgccggttaaaggagaaccggctctcggccttatggcgctgattccgcaggctaaagacacgctgaatatcccggtgattgcggcaggcggcatttttgaccgccgcggggtgcaggcggcccgatgtttgggtgcggacggcgttcaagtaggaacaccgtttctcctttgtgaagaaagcagcgcctcaccggcatatcaaaaagccattgccgaatcaaaaggagccgatacgcggctgaccaccctgttttcaggaaaacaggcgcggggaatcgtgaatcagttcatgaaaacatatgaagctgacgagggaaaaacgctgccttatccgctgcataatacgctgacaaagccgatgcgcgggcacgcggctcaatcaggagacgcggagcatatgtctttatgggccggccagtccgccgcgaaacttgaggggccgacagacgtgaaaaccgttttggacagattgtgcgaatcataatccagaaatcgtgaggtgatggatgatgaagattcttcaaatgtcctataaaaaaagagggactattgagtttgtctttgaagattttccgcattccaaagtcaccatggcgccgattaaagggtattactttgtccgcgccattaaatggagcagacgggacagagccgtcacccgccatgatttagagaagtttgaatgggctgcaaaccaagcgctcggcacgacggctttttaccggaaaagaaaagcatttcacatcccatcgtcacaatgacagacgatgggattgttttaatgcatgatctgataaagcgcgggtgcatcaagccttgttgcctggttaagcagataagccggctgcacggcatttttttttcttaaagaattcaatctctggatgatttgttcagcggtcagaatcccgagaccgtgggcgaaatattgatcattccccatcacaatgacattttctccccgccactgagcctttgcagggttaaaatcaggatttttaaaatataaacagtctccccgtaaaaagtggctgccggtttccgtgtagatcggcagatgctcatagtgccagtcatacaaagtgatatcccggaaacgccggttaaaccgttcttcaccgattgtctttaagacggccagataataaatcacaacaatggcggtagcgcattcaaatgcgtaaaacgccccgttttcaataatatcccgaatcgcttttgaagcgggaatcctgtacttcagctccagggctccttccggcgtcagtctccaataagccgtatttccgtatgttttggcgaaagttgcaaatttcacacctgatccgtgcagttctcttgcggcttccacaatatggcggcgcagccgcacctcgaacatcagttcagcaatcgacccgtaatcgaattgtacgggagaattgagcagttcatttatatacggaacaaggctttcttccgtctgccagttcgcgatgtcctgaggccgaagcacttggccggatatgataatcatctgcgcgccccctatctttttttataagatatgcaggaagcttgggcaatgaaaatcaagtgataaaaaaggaggaaatgttaacaaaatgtgaagactgagccgatatataaggtatcacacttgagggagcagcttaatatgaaaaaattcattaattggtgcacaaaggcatcgatttcacggaaattaatcatttcatttatcgtgatcttaatcataccgattctcgtgttagaattcagttcataccatacggcgagcaattcgctggatgatcagatttcaggcaacgcgaaaaataacatcgaatcttttaacacaacgattacaaatgatatcggcgcaaaagcaaaggcgattgaatttttcagtgaaacgttaaaaggatcatccttctcaaagaaaaacatgtctgctcttgaagaaaagttcgggcaatacacgtctattcataaggacgtagcccgcatttacggaggaacggaagacggcagctacgcacaggcgccgaaggaaaatactccggccgattacgatccgagaacacgcacttggtataaagacgctgtgaaggccggcggcacgctcgttgtcaccgacccttacaccgcggcaagcgacggcagcatggtcattaccgtggcaaagcagatgcaggacggaacaggcgtagtggccatggatattacgattgaccagctgctgaagcagatgcagggaatcaaaatcgggcaaaaaggattcgtgtttatcacgtccaaaaataaaacctatgtcgcgcataaagaccacaaaccgggcgataaagtttcaacgccgtggctgaatgaggtatacagcaaagacagcggcattatttcatacaagctcgatgatcaaaataaaaaaatggcgtttacgacaaataaactgaccgggtggaaaatagaggggagcatggagctcaacgaaattaaagatgcctcacaaccggtgctgacgatggggatgattgtccttgcagcatctattatcatcgggggaattttaattctgttgattgtcagatccattacgtcaccgctgaaacggcttgtccgctcttctaaacaaatcagcggcggagacttgactgaaaccattgacatccgctcgaaagatgaattgggcgaactcggcgcgagctttaatgaaatgggagaatctttgcgcggactgatcagcgcgatccaaaactctgtcgataacgtggccgcgtcatcggaagagctgaccgcttcagcttctcagacaagcaaagcgacggaacatattacaatggcgattgagcagttttcaaacgggaacgaagagcaaagcgaaaaagtcgattcaagctcagccaagctgaatcatataaatgacggactcgccgccgtttcccgcacatcatcatccattacggaggcatctaaacaatcgaaggaagctgccggcaccggggaagaatatgtgcagcaaaccgtcgggcagatgaatctcatcaatcaatcggtccagcaggcggaagcggttgtaaaaggccttgaggccaaatcaaaagacattactcatattttaagagtcatcaacggtattgccgatcagacaaacctgcttgcattaaatgcagccattgaagcggcaagagccggtgaatacgggcggggcttctcagtagtagccgaagaagtgagaaagcttgccgtccaatccgccggttctgccaaagagattgaaaaactcattcaggaaatcacggctgaaattaatacttcgcttcacatgtttacatccgttaatgaagaagtgcaatcaggacttgccgtaacggatcgcacgaaagaaagcttccagaatatcttcggcatgacgaacgacatcgccgaaaaactgcaatcaatgaacggcacggttgaacagctgtcagacagctctcagcacgtttcagccgcagtgaccgatattgcggacgtatcacgggaaagcgcagcaagcattcaggatattgccgcatccgcagaagaacagcttgcatcaatggaagaaatcagcacatccgccgatactttggcgcaaatggccgaagaactgcgggaattaacgaaacaatttaaaatcaactagtaaaaaaggacgctttccaggtggaaggcgtccttttttatagtgacagccggataattaaataaaaagtcttgcatacaaagggagtacatagaactatttttcatttatgacttaattttcaatgtaataaaaagggagtcggccgatataaacagtaaatgattgaaagaggtttacaaaattgaaaaaaacagcaaaaaaaatcgccagaaaatcaatagccaaaaaacttatcatttcatttttactgatcttaattattccggtagcagtattggccgccggcgcctaccgttcggcggcttcatccgttgaaaagcaaatgatggaaagcgccgaaggaaatgtgcaaatcttaaacaatatgattgatgaccggatcggaatgtttacaaaaagctctgcatatttcagcgaatgggcgacaagcgctaaatttaaagaaaaaaaccaaacggaaatgcaagaaaggtttaaacagtttattgaaagcaatgataaagcgtccgccatattttcaagcagcaaggaaggaacgtttacccgttatccgcatgccgatatgccggccgatttcaatccgcttgaaagaagctggtatcaggaagccatggagaataaaggccaaaccatcatcacggacccttatgagtccatctcaaacaaaaagatggtcgtcaccatggcccgcgcggcgcaagacggatcaggcgtcgtcgccattgatataaaaatcgacgatctcatcacgatgacaaaagaagtgaacatcggaaaagaaggatacgcctttatcctcagcaaaaataaaaaagccgttgcctacagtgatgaaaaagccggcgcggcggtatcgggaaaatgggttgatacattatacagcgggcaaaaaggcgactatgaatatacgctgaacgggaaagcgaaaaaaatggcgtacgtgaccaatgaagcgacgggctggaagatcagcggaaccatgtccgtggatgaaatcaaggatgcggcaagaccggttctgactctggccgttatcatattggcgatagccgttgccgcagggatgattttcatttattttgtcatccgctcaattaccaaaccgttaaaacgtctcgtagcttcagcggaaaaaatcagcagcggagatctgactgaaaccattgatgtcagctctcaagatgagctcggcgtgctcggtaaaagttttaatcatatgacagattcactccgttcgcttattcagggaattcaggactctgttgaacatgtcgcttcttcctcagaggagctgacggcttcggctgagcagacgagcaaagcaacggaacatatcacccttgcgattgaacagttttctaatggaacggaagaccaaagtgagagtattgataaagcgacagcacaagtgaatgagatgaaagacgggctcagcgatctggcggaagcggcagccgttgtgacggaaacttcaattgaatcggcggagatatccggcgccggtgagcggcttgtcaagaaaacagccggccagatgggcgccattgaccaatccgtaagtaaagcggagcaagtcgtacaagggcttgaactcaaatcgcaggacatcaccagcattttgcgcgtcattaacggcattgccgatcaaacgaatctccttgctttaaatgcagccattgaagcggcaagagcgggagaatacggacgcggtttttcagttgttgccgaagaagtgagaaagcttgccgtccaatccgccgattcagcgaaagaaatcgaatccttaattcatgaaatcgtcaaagaaattcatacttcgctcggaatgctggaatccgtcaatcacgaggtgaaaagcggacttcagttaacggacgaaacggaaaaaagcttccgggacatttccgctaaaacaagtcagattgccggtgaactgcaaaatatgaatgcaaccgtggaacagctttctgccggatctcaggaagtatcaaacgcttcagaggatatcgcggcagtctccagacaaagcgcggccggcattcaggacatcgcggcttcagctgaagagcagcttgcgtccatggaggagatcagttcctcagccgtcacgctggaaaaaatggcggaagaattacgcgaactgacaaagcgttttaagataaactcttaattaagtctaaaagactaattttgcaataggtaaaaagtatgtttcgttatatttcttctttttggatgtgtatatttacccataattgccgatatgaagggtaaacacgcaagaggagatatagcagatgaaaaaaattgtgcaaatcatcaagcagagatcgcttacaagaaaactgctcatttcttttttggccattctcattcttcctatttcaacgctggcttttatcgcctatcaatcggcggtaagtacgcttgacaggcagatgatgggaagcgcattagataatgtgcagcagattaacgatatgatcaacacaagcatcagccaaaaggaagacggaacggcatatttcagcgactggctcacaaaggatcggtacaagccgaaaaaccaatcgcaaattaccgataaattcacagagtacatgaagattaataaagacgtggaatccatctatacgagtgacacggaaggacatttcacacggtatccggatctgcagatgcctaaaggatataatccgcttgaaagagactggtataaaaaggccgtggaaaataaggggaaagttgttgtaacagatccttaccgcacggcttccaccaatacgatggtcgtgacggtcgttcagcagacgaaagacggctcaggggtcgtcgccatcaatatgaaaatcgatgagcttctgaaaacgacaaagaaagtgaacatcggaaaatcaggctacgcttttatcctgacgaaagacaaaaaagtggtcgcccacccgaaccgtgcgtcaggcacagtattaaacggggagtgggctgaacagttgttcaccagcaaaaaaggtgattttcaatacaaatacgacggccaggaaaagaaaatggcttatgatacgaacgggctgacaggctggaagattaccggaacgatgtatctggacgaaattcatgaagcggccctgccgatccttcatctgtccctgctcgttctcgtattagcgattgtcatcggaaccatcgtcatggtgctgattatccgttcaatcacaaaaccgctcaagcagcttgtgacatcatcgaaacagatcagtgaaggcgacttaacagaaacgatcgaaattcagtcaaaagatgaattaggcgagctgggcaaaagctttaacaatatggccgcttcactcaggtctctcatccatgccattcaggattccgtgaataacgtcgcatcttcctcagaagagctgacggcttcagcggagcagacaagcaaggcaacggaacatatcacactggcgatcgaacaattttctaacggaaatgaaagccaaagtgaaaatatcgaaagcgcggcggaacatatttatcaaatgaacagcgggcttaaagatatggcgaaagcatctgccgtcattaccgaatcctccgccacatcagcggaagtcgccaattcaggcggaaagctcgtccaccagacggtcggccaaatgaacgtcattgaccggtcagtgaaagaagctgaacaagtggtgcgcggacttgaaacaaaatcaaaagacattacaaacattctcggtgtcattaacggaatcgctgatcagacaaaccttcttgcgctgaacgcggcaattgaagccgcgcgtgcgggtgaatacggccggggcttctcagtcgtcgccgaagaggtcagaaaacttgcggtccagtctgccgattcagcgaaagaaatcgaaagcttaattatagaaatcgtcaacgaaatcaatacatctctcggcatgttccaatccgtcaacaaagaggtggagagcggactggatattacgaatcagaccgaaacgagcttcaaacggatttctgaaatgacgaaccagatcgccggagaaattcaaaatatgaatgcgacggtagaacagctgacagcaggatcacagcagatttcaggagcttctgagcaaatcgcgtccatcgcaaaagaaagctccgccagcattcaggatatcgcggcctctgccgaagaacagctggcttcaatggaagaaatcagttcgtcttcggaaacgttatcccaaatggcggaagaattacgtgatatgacgaaacgatttaaaatagattaatagatcatagaacacccaaatgtgctgtttgggtgttttttttagtttttttaataaatcttttgtcctatctgacgatattagatttagcttttcaaagaaggagactgaaaaaatgaaacaactgatacattggatcaaacagccatccatcagcaagccgctgatcgcggcatttttagccgtattggtgcttccggtcggcatactcgcctacttcagctaccaaacggcggggagtacattagaaagcgaactgacccacagcgcccagggaaatgtcagtgaactgaacagcgtgctggaaaacatgcttgagggtaagctgaaagcgattgactactacagcgaatcaatcacaaaggaaaaactgaacacgaaaaataaatcggtactgctcgacaatatgaagcagtatgtcaccgtaaatggcgatgtcgcgtcaatttacgccgcgtctcgcgacaaagcgtttgtgaaatatccgtccgctgacatgccgtccgattataatccgctcacgcgcgagtggtatacaaaggcggttgaaaaaagcggacagccggtgtttaccgagccttataaagacgctgcaaccggacagacggtcgttacgattgcccagcagacaaaagacggatcaggcgttgtggcgcttgatattaatctgggcgacctgctgaacgcttccgaacgcgtccagatcggtcataaaggatttgccttcattacaacgggggataaaaaatacatcgcccatccgactataaaagcgggaacggaaggctccggagagtggacgaaagaagtattttccaaatcaagcggatcgtttgaatacatgtttgaaggacagcagaagaaaatggctttcacgacaaacaaactgacgggctggaaaatcgccggcacattttttgtcagtgagatccatgacgcagcctcgcctgtcatgaaaatggcgctgatcatcctggcggtttctcttatcgtcggcggtattttaatcttctttatcattcgctcgattgcaaaaccgctcaaaaaacttgtctcgacatcagataaaatcagtgacggcgatttaacggaagtcattgacatcaagtcaaaaaatgaattcgggcagctcagccaaagcttcaatgagatgtcggcatcactccggtctgtcatcggcgtcatccaatcatccgtcgaacatgtcgcttcttcatccgaagagctgacggcatccgccggacagacaagcaaggcgacagagcatattactctggcgattgaacaattctcaaacggaaacgaatcacaaagcgagaaattggaagaaagtgctgatcacctttcccaaatgaatgcgggcattgccgagacggcgaatgtatcggcggaaatcactgaatccgccatccaaacctctgaaacggccggaagcggagaagaattagtggcgaaaacggtcggccagatgaaaacaattgatcgttccgtacagcaggcggaagccgtcgtaaaagggctggaaacgaagtcgcacgacattaagagcattctgaacgttattaacggcattgccgatcaaacaaatctgcttgccttaaacgcggccattgaagcggcaagagcaggcgaatacgggcggggcttctccgtcgttgcggaagaagtgaggaagcttgccgtacaatcagccggctccgcaaaggaaatcgaaacgctgattcaggaaatcgtcaaagaaatcgccacatcgctttccgtattccaagcggtgaatcaagatgtgaaggaaggcctcgatattacggatcaaacggccgaaagcttcaaaaaaatctcagagatgacgactcagatttcaggcgccttgcagcatatgaacggaacgcttgagcagcttgcagccgggtcgcaaaatgtgacaaacgcggtggaggacattacctcagtcgccaaagaagggtccgccggcattcaagacatcgccgcctcagctgaagagcagctggcctccatggaagaaatcagttcatccgccgaaacgcttgcgcatatggctgaagaactgcaacaggtcacacggaaatttacgattcagtctgaagacgaagaacagctgtaacgagctgtttcttttcctcatctgaaaaaagcgatacactaatataaaagaagggagtggcagtgatgagattagaaggcaaaaaagttatagcgcttgtcagtgacgattttgaagacttagagctttggtatcccgtctatcggctgagagaggaaggcgcgatcgttcatttaataggagaagaagcgggccgttcatacaaaggaaaatacggcgtgcccgcgacggcggattacgattttaagagcctgattattcaggagtatgatgccgtgctcgtgcctggcggctgggctcctgacaaactgcgaagatatcccgaagttttggacatcatccgtacgatgaacgagcagaaaaagccgatcggccagatctgccatgcgggctgggtgcttatatctgccggaattctcgcaggaaaaaaagtaacgagcacgcccggcatcaaagacgacatgacaaatgcaggggcaaagtggctggatgaagctgtcgtaactgacggccacattgtatcaagccgccgcccgcccgaccttccgcagtatgcaaaagcgtttgctgacctgttagcgtccaaataaaaaacatccgcccgaatccgggcggatgtttttagttttgatcggcgggaaagacgattccgatttgttttctcgcttcttccataatgtttgccgtaatgaaagaacgttcaaatgtattttcggaagactcccgctgtccgtttcgaagaagattgatgaattcagccgtttcgtagtacatcgaaggtttcagatcagggactgaaatgtcttccgtccggccgtcacgatagcggatttccgcccgttccggtccgtgaatgctgtccagaacgatcgtgccttcttcaccctgaatttccgccggggcaaacgaatttgagattttcgaatgcatcagcaccgcttcaaatccgtcgtatgacagaatgaccgtgccttcgccgtcaacgccggatgctagtttatgaccggtcgcaatgacgtttttcggtttgccgaacaggacgacggccggataaatgcagtacacgccgatgtccattaacgaaccgttcgataattcaggcttaaacgcgttaagcaccgtaccgtttttatatgcatcatatcgtgatgaatattggcagtagcttgccgtgaatctcctgacgggtccgattttatgtaagtggttttgaagcatgctgaagttcggcaggaacgtcgttttcatggcttccatcaagagaacgccgttcgttttggctgcgtgaatcatttcatccgtttcccttgcgttagacgcaaacggtttttcgcatagtacatgcttgccgtgttccataaaaaggaccgcctgctctttgtgaaatgcattcgggctggcgagatacaccgcgtcataggctttgctttccgccatttctttcaggctggtgaaataatgagcagcgccgtgtttgccggcgaattccgccgcacgttcctcagttctggaataaaccgccgttaattgaaaatcatcaatagcagaagccgcctccagaaatcgttctgtaatccaattcgttccgactgttgcaaatcgaatcattgctatcgctccttctatgtattggcttacattatagctttttttcaaagaaacataaatggaaaaaaggctgccagctaaacggataggaaaaattcccatagagaccggttattatttttcattacaggaacgatagtgtacaatttaagtaaaatacatatgatggaggaacaatagtggaaacattgcaaacatggggcggcagatttaaacagtttttcttagacaataaatttgtcttgtttttgcttgtattgctgctcatcggtctcaatatccttgtctttatgaagacatcatttattttcacacccattatcgtcctgctcaaaacgattgcgctccccgtcattttgacaggaattgtttattatctgcttaatccgatcgtagatatattggaaaaaataagagtgaaaagagtctattccatcctgctcctttacctcattattatagggctgatttcgattacggtcgtttcaattattccgtttttaaaggaacagatcatgagcctgatcgacaacctgccgaaatatgtggacatcgttgaagatcagacgaaaagcctgatcggaagcgattttgtaaatcaggcgcaaaagacgatgaatatcaacatttcggatcttgccaataaagtatcggcgcaggcggcgacaattgcaaacagcacatttaccggagtcgggaattttatcggcgcgctgactgaagtgattatttcaattgtgaccgtgccgtttattctgttctatttgctgaaagacggcaaaaaactgccgatctatatcttaaagtttgtgcccacccgtctgaaagaacaaacgtatacgatgctgagtgaaatgaaccacagattaagctcctatatcagaggacaggtcatcgtcagcttctgcatcgggtttttattatttatcggctatctgattatcggacttgattatgcgtcactgcttgcggtcattgccgcttgtacgagcgttgttccgtatttagggccgaccattgctatcacgccggcgattattatcgcgttggtcacttcgccctttatgctgctgaagcttgcgattgtctggaccgttgtccagctcgtggaagggaaattaatttcgccgcagatcatggggaaaaatcttcacattcacccgattaccatcatctttgttcttttaaccgccggaaagctgttcggggttgtcggcattattttagccatcccggggtatgcggtcatcaaagtggtcacgacccatctgtttgattggttcaaaatgcgttcgcatttatatgaagaagaaaaaaatgatgctgtatcgaagtcataaaatcggaacggacatgatatttattataagacaggctttccttcaaaggagagcttctcttttgtaaatgatgaatgaagggaagaatgggatgacactatgggagatgttcacagcagccgttttgggaatcgtggaagggctgacggagtacgcgccggtttcttccacgggacatatgatcatagcggatgacatctggctgaaatccggaagcctgatgaatccggaagccgccaattccttcaaagtggtgattcagctcggttcgattctggcggtggccattgtgtttaaggatcggatattacatttactcggcctcaaaaaaaacgtcacgcgcgatcagcagaagggatacaggctgaccatcgcgcaaatcgccgtcggtcttgttccagcggcggtgctcggctttttatttgaggatttcattgaccgctatttattctccgtcagaacggtcgcttacggattaattgccggagccgtgcttatgcttatagcggactggatcaataaaaggaaagaaacgatcgatacggtggacagaatcacctacaaacaggctttctgtgtcggattattccagtgtctcgccttatggcccggattttcccgatcaggctcaacgattgccggaggtgttattgtgggcttgaatcaccgggcagccgcagacttcacatttattatggcgattccgattatggcgggcgcaagccttctgaagctggtgaaatactggagcagtctttcttatgacatgattccgttttttcttgtcggctttatctgcgcctttgtcgtcgccctcttagtcgtcaagttttttcttcggctcattaaccggattaagcttgtcccgttcgccatttaccgtgtcatcctcggcatcattttaatcatgctcgtgcgataaacgaagaggccccccggagggtcttctttttatgttcgaaaaacgtctcaggaaaatatgagcaaactgaattttctgcttgaaattcatagaagagtcgtctataataaaacatgacgttacagcacggggccatagctcagctgggagagcgctacgctggcagcgtagaggtcaggggttcgagcccccttggctccatacctttaaacccttattctataaataagggtttttttgttttttcatcctctgcagcagcctctgtgttccgcttcatttctaacaactcaaaataaaggaaagagagaaaatgaaaaagaaaatctatcttatattatctctgtcagctgcactggcacttcttttaacggcgctcccggctctttctcctgtcatcttcacgtctgcttcagaaaaaggagccatcaggcatgacatttataaaaaaggatatccgtatcaaagctactttgcgattcttcaaaaagaagaaggaggcggagaggacgggaacctttattatgtaaattggttcaattggaaagatgaaaccggacagacgccgcacgtatgttattcaaaaaaatcgtccgaaggcgagtacaaagtaagctgcggaaccggatcgtaatgatcaagagcccctctgcaatgaggggctctttctgtcgatgtggatccgcttaataccccctatagaacggctgaacataatgccgatacggatcattcggataatgcgtatttggctgataaggcttattcatatcatgaatacccgtgttttcagactgtccgcagtatttatcgggacctatcacagttgattgccggatcggtgaaacggctttttcccactcgtgctcattcagacagtacgtatgcgccatgatctcaggcggcgtcagacggagaatatccgagccatatatcacttcaggcgaaggggcgtcaaatatggccaaaaggtgggttttgtctgaagtggcgacttcataatgccaccacccctgcggaacattcgccacttgtcctggagagatcggataattccgtattttctgggtgaacggattcagcatcgacaccaccgcggaacccgaaatacagtacaccaattcagcggcgttttgatgggtatgcggttcaatcacatttgttttactcagaaagatatctaataatgaaatattttcaagcgtgtttaactgtttaatccccaatacattgataaagttccgagcatctttcgtaaaaaaacggctctcatttacatcataagtgaactgtgtattcggagacgtgtaatcgatatcggaaaccatgcaatcccccgctttcatctttaaacgtatattcccaaatatatgtgtccctgtttcaccgggtgataaaaaaggaggtaaaatccataaattccaaattcaacacaatattgtgacgacttttttaaagattcattttagatatatcttttattcgaaatatctcttactataaagatatattaaaaatacatctttagaagggttgaggatgaacatgctggatgagagaacagtagacatcatcaaaagcacagtacccgtattaaaaacacatggagaaaacatcaccggacgcttttataacctgatgtttcaagatcatcccgaactgttaaatatgtttaaccaaacgaaccaaaagaaacagactcagcgcgcagcattggcaaatgcagttattgcggctgcggcgaatattgatcaattagaacaaatcattccggcggtcagacagatcggccataaacacacaagtatcggtgtaaaaccggaacattatccgattgtcggaaagtatctgcttctggcgattaaggatgtgctgcaggatgccgcaactcctgaaattatgcaggcatgggaaaaagcttacggtgttattgcggaggcttttatcggcattgaaaaagacatgtacagtgaagccggatggcaggggtataaagaatttacggttatacagaaaacaaaagaaagcaaagatatcacatcattttatatcaaaccgagtgacggctcttcgcttcctggatttgaagcgggacaatatatcagcattaaagtgaggattgcggattctccttatacgcacattcgccagtacagcctgtctgatgcttctcgaaaaggcgcatatcggatatctgtgaaaaaggacggagcggtttcttctcatctccacaatgaagttcaagagggagataaacttgaagtcagtgcacccgccggggatttcaagctgtcttcttccgaaaaaccggttgttcttatcagtgccggttccggaatcacgccgatgatgagcatgctgaaaacagccgccgaaaaacagcccgagcgttccgttacttttattcatgccgcgaaaaacggagagtacgccgcgttccgcaaagaggctgaacaagctgcggagaatcatccgaatattaacgtcatttatgtatacagtgaaccggcagaacaagaccgctcaggagacaagcctttttacagcggccggattgatcaaaccttcttggagcagcttcatctgaatcaagatgctgaatgttacttgtgcggatcagcacagtttatgacgcaaatgaaagatatgattcttgcactcgggtttgactctgattccgttcaatttgaattgttcggccctcagctgagcatggcataacaaaaaaagactcctcattgaggagtcttttttatttgcacgatgtgttctttctccgtctttttccctattttattgaaattttcatcaatgaccagtaaaattataaatctagtgattccggaattaaaggaaggttgatatgaaaaagaaagcaaagaccaaaagggtgcttgggtgcctttttgctgtatctcttatattcggattatttctggtatcaatggtattttcgaaattcatagtgacggaagaaaaaccgcctgaagaggtggacgagcagcaggtctttattgacagcctttccgggcatgctcaaattttatatgagaaatatcatgtccttccgagcatcaccctcgcacaggccattctcgaatcggactgggggaacagtgagcttgcggggaaagcgcgcaacctgttcggtgtaaaaggtgattataaaggaaaacacgtcacgatgaaaacggatgaatttgaaaaaggaaaacgaaaaacgattcgggcaaaattccgtaaatacagcacgttttttgaatcaatggatgaccatgccaaattatttgtcaacggaacgtcttggaataaaaagaagtacaagcccgtcattgaagcggacaattataaaacagcggcggctgcccttcaaaaatccggctacgccacagaccccggctatgctgaaaaaattaaagatgtcatagaaacctataacctgaatgaatatgacaaaatcaatgcctctcttaaagcagttgataagaaaggcgccatcaaagaccacgccattgaagacgtgtggtccaagccgtcgaaagagcggcattctattaaactggcatcggcgcaaaagtttaccggccagcatattaaagtcgtatctgaaaaacaaaacggagaatccgtctggtaccaaattcaagtgaaagataagctggtcggctgggttgaccaaaccgccgtccagttaagtgaagaaacataagcatcaaaaaaagccggcagcttgccggctttttttacattccttcagtttcaaaccttttaatatcacgtttatgccccatcagcacaaggcagtcacattcatgaatgacagtctccggagaaggggacagctgaatgtctccattatgtttcacggcgagaatggtgcagccgaatctggcgcgtgcgccgagatcaagaagggattttaaatgcagctttttagtggctgaaagctccacaatgctgtattcatctgacaaatcgatgtaatttaagacgttttcatctgaaaggctttgcgcaatccgcacgcccatatccttttcaggatggataatacgatcagcaccgatcttttcaagcactttgtgatgataatagttttgcgctttcacccaaatattagggatgttcagctccttcaataacagcgtcgtcagcgtgcttgcctgtatattggctccgattgctacgatgacatattcaaaatttctgatgccgagcgactgaagctcgctttcttccgttgaatttgcccgcacggcatgcgtggcataagaggagtatgcgttgacccgctcttcgctgatatcgatcgcaagcacctcatgccccattttaaaaagctctttacagatgcttccgccgaaacggccgagtccgatgacggcaaattgtttatttttgatttttcccaatcctcataactccttaagaaactgttttcgtcactccaaatacaacaaacaagaatgtactcctgtttcaggggtttgtcaatgcgagggccggaagaaagaaaacagcacaaaaaaagaccggctgacaagcgatgagcttgtgccggtccgtttttcgcaattatttgcagttgcatggctgtgtcggcggtgtgctgcgtttttgaacaacaattgtgtcctcagcatagaatttagagccgatgcttaatgatttattttctgcacggaacttatatgtacctgcagcaggcaatgttttattattaagagaaagcttaaattccgctgcgccgagcaaatcaatgtttaacggaagtctgactgttttgccgttattcagaatctgtctttcgcgcaaagcgtgtccgttgactgtatcttttgttgtagccgcaaatccgctaggaagggtaaattccataacgcctaagctcaggatcgtgttcggacggtacgtcaattcgatatcagaaaatgaccattcctgctggctggcacctgtatattttgcaaataaggtagcagtcgctttcgtggacatttccggctcgtgaacggttgagcctgactcagcggcgaatgacgctgtcggcagagaaagaagcaaaaccaggccgaataaacttgccatgacagttgagaaaaacttgtgtttcatttttataaatccccctaaaaaaaatttgctgattgttcttaaaaaagaacgaccatacctataaaaatttaccatcaattttaatggaagtaaatggggttatgttcctatattttctcaaaaataatcaaatcacgacaaaaaacgcctgaatcaaaatcaggcgtttttttcgtccgtttctatcggaataaatttaaaaatctccccgctctgaaccgagtcggcgagccgcttcagccaatgataataagctttcgagctttcaagctgatcatataactgccgcgcttcttcctgtaattccgcgctgccttcctcggccagcaaaacggactgcaaatccgcctgagcctgtacgatggcggacaaattcacctgaacttcacggtcccatttcggcggaaagaaattcgtgaaaaacgtaaagaaatccttttccgctacaaacgtatgcttccgtgtgccgcggtgaaaggtttttttgaccacatttaaatcctgcagctttttaacgcccgtgctcatactcggtttgctcatctgcagttcctcacgcatttcgtcaagcgtcatttcatccctcatatacattgttccgtataaaatcccgacactccgggtgattccgtaaagatccatcgtctctgcaatggaatcaatgacaagatccctggcttgttctatagctgcgaattctggattctcatccatactgtccctcttttcctcttgaagtttaaatttgttaagtcatttctttatgttcttaatcttaacgaatcatgacaaaatgtcaaaatctaaacggactgaccgggttttgacaggcaaaaaaacatgtgttaaattaacattgttaaaaacattaaatttttatttaacaaacttacttctcggtaaggaggactcttatgagcaaaacgctttatatcggcggcgaatggatcagtgcagaaaaaaaacagacccgccgtatcattaatccatttaatcaagaagaaattgcaacggtatgcgaaggagaccgggatgatgcggtgaaagccatcgccgcagccagaaaagcatttgatgaaggggaatggccggtgctttccgggctcgagcgcggacaatttgttctgaaaattgcggaattaatcagacgcgatctgaacgaattagctgagctggaatcgcttgatacaggaaaaacgattgaagaaagtaaagccgatatggatgatatcgcaaatgtatttcaatattatgccggtttggcggataaagacggaggcgaagtcatttcatctccgattcccgattcagtaagtaaaatcgtcagagagccaattggcgtatgcggacaaattacgccgtggaactatccgctccttcaggcgagctggaaaatcgctcccgctcttgcggctggaaacacgatcgttttaaagccgagcgagattactccgcttacaaccattaaagtctttcaattaatagaagaagccggtattccgaaaggggccgccaatctcgtgctggggccgggcgcctctgtcggcgatgagctggcgagaaacctcgacgtcgatttggtctcttttacgggcggaattgaaacaggcaaaaaaatcatgcaggcggcaagcggcaacgtgaaaaagattgccctggagcttggcggcaaaaatccgaatatcgtatttcaagatgcagatctcgaaacagctgcagatcaagcgctgaacgccgtgtttttccatgccggtcaagtttgttcggccgggtcacgtcttttggtggacgaagccattcatgatgaatttttagccgagctgatcaagcgcacgaaacgcatcaaattaggaaacggttttcatgaagatacggaaagcggtccgctgatttccgccgagcatcgggccaaagtcgaaaaatacgtagaaatcggtatcgaagaaggggcaaaactggaaacaggcggcaaacgtcctgatgatcccgcccttcaaaacggtttcttctatgaacctactattttctcaaactgcaagtctgatatgcgaatagtccaagaggaaatcttcggccccgttttaacagtcgagtcattctcttcagaagaagaagtgatcagacttgccaacgataccatttacgggctggccggagcggtatggtcaaaggatattgaaaaatgcgaacgcgtagccgccaaactgcggatgggaacggtatggatcaatgatttccacccgtatttcgcgcaagcgccatggggcgggtacaaacaatcgggcttcggccgtgaactcggcaaaatcggcctggaagaatacacggaaatcaaacatatttaccgcaatacgaaacctgcggctgtgaactggtttcaagcataattaggaggagatacaatatgacattaaatatgaaagtagaaagcatgcataaattccatacattcgaaatcccgacagtcattaaacacggaatcggcgcgattcagcacgcgggaagtgaagtcagagcgcttggcgtcacaaaagcgctgctcgtaacagacccgggaatttataacgcgggagtggcaaacccggtcattgaatctttgcaggaagcgggcatcgaagtcgtcctgtttaacaaagtggagccgaacccgcctgtacgtcttgtaaacgaaggatcagaactgtataaaaaagaaaactgcaacggtcttgtggctgtcggcggcggaagctccatggatacggcgaaagcgatcggggtagaagcgacacacgaaggaagcgtgcttgattatgaagccgcggaaggcaaaaagccgctggaaaaccgcattcctccgctgacaacgatcccgacgactgcgggaacaggttcagaggtcacacaatgggcggtcattacagatgaggaaagagaatttaaattcaatacgggcggaccgcttatcgctgcgcatttaacggtcattgaccctgagctgcacacgtccatgcctccgcatgtgacggccatgacaggtattgacgcacttgcgcacgccatcgagtgctatacgatgaaattcgcgcagccgatcactgatgccgtcgctttaatggccattgaatatgcggcgcattatattaagcgcgcgtttgcggacggagaggatttggaagcaagatacggcatggcgcaggcggcgatgcttgccggcctttcatacggcagtgaatcagcaggcgcggcgcatgcgatgagccagacgctcggcggcatcatccctgtcgctcacggacaatgcgtcgcagctatgatgggaccggtaatggaatacaactggaaaggctatccggaaaaattcgcccgcatcgccaaagcattcggaatcgatacaagcaacatgacaaccgaagaagcggccaaagcgtccgtcaactggatgtatgatcttgtaaaagatttagaagtgccgagtttagaagaacaaggtgtgtctccggacatgattgaacgtttatcaaaagaagccatgaaagatccgcagactttcggaaatccaagagatttgaatgagaaagcatacaactggatttacaaacgctgctttgacttaacgccgaaaacggtataataaatgaaccccgctcctttacagagcggggttttttaaggataatgtcaagaaaaaggcggtggtggctgatgtggaaacgcataacagcaaagacggaaggcgtatatatagcggataccgaacaatttgttaccaaaaagatggacaagcttcgcgcggaatacggcgggtttcccggtgacctgcatttcggactgacaaaaaaggccggcgcgcgtgagccgatgtatgaaagaggaacagaaatttttaaccggagacaaatttcaatcgtgtccatggaggaatgtgatgacattgcggagaagatggggatttctcatatctttcccgaatggctcggcgctaacatcgcaatcagcggtttttctgcgctgacgccgcttaaagaaggaagcagaatgatttttccaagcggtgcgtctctgttgtgcgagggagaaaatgatccgtgcattcagccgggagaagtcattcaatccttttatccggctcagccaaaactcgccgcggcgtttgtgaggcacgcgatgggcagaagaggaattgtctgtattgttgaacgcccgggtgatatatgcacgggcgatgcggtcaccatccattcctatgaaccgaaacgcgccaagaaaaaaatcgagaaggtctgactcagaccttctcgattttttgtttgatttcttctatttgatcgatgtgacgcttttcatgatggccgataaaatcaatccactgccggatcgtcagttcttgaaaaacgggatgcggaagcacacgttcaaaatcttcctcgtttaatgatgaaataactgcggtcagctgctgtcttgccgtatctaattcttgttttgcttcaatgactgagattcggttttgctcaggttcgaggtgtgacggcgccggccgtttatttgatctgtcctctataaactccatcggtttgtcttcgatttttttaaacggtgcgtcttttgcctgctttgataaaagggtctgcgctgtttcgtcaattttctttaaatggtcaaggacttcccgcacgctccactcatcagccgcgggctttcggttgaattcctcatcagagagccctttcagtacttcccaggtctgctgtctggcttcattaaaaatgctcatcctatctcctcctttagagtaaacatatcatatccggattggataatcatgtaatcagccttccttatcagaaaattgaaaccatttacctttacatccgtatataaagtaacactccgacacctcagccgaaaggaggatagaatgtggacatatttcatctgccgtttgaaacggtctatctttacacattgattatttcgggaagtctcacgcttttgattctgttttttcaagatgtgtttcacggcctctcagaagccattcctgtttcatttttaaaccctgcattgattctgtcttttttaacaatcttttcagcctcaggttatatcggcgaaatcgccgctccgctatcaagtcctgtcattgcgttgctttcatttgttctttcggttcttttggtcagcctgcttcacttcttcgtccttgccccgctttcatcagcggaagaatcgctcgcatatcgggagacagatttaaagggcagggtcggcagggtcattacttccgtcccgaaagacggctatggggaagtgatcatagagggaatagggggcgccatttctaaatcagccgtcagctttgatcaagaacagatcagatacggaacggccgtattagtgattgacgtgaaagacggagtgctttttgtgacgccgcatgaaccaatctgatatctaagggggaactgttatgactatgccgattatcattgttatcggaatcgtattctttttactcatcgcacttattgctgtatttattacgaagtaccggacagcggggccggacgaagcccttatcgtgaccggaagttatttgggaaataagaacgtccacattgatgaaggcggaaatcgtctgaaaatcgtccggggcgggggaacgttcgtgctcccggtattccagcaggcagaacctctcagtttactgtcaagcaaacttgatgtctctacacctgaagtctatacagagcaaggggtgccggtaatggccgacggaaccgccattattaaaatcggaggctccatcggtgaaatcgccacagcagctgaacaatttttggggaaatccaaggacgaccgtgagcaggaggcgcgggaggtgctggaaggccatctgcgctccatcctcggctccatgaccgttgaagagatttataaaaacagggaaaagttttctcaggaagtccagcgggtcgcgtctcaggatcttgctaaaatggggctgatgatcgtttcttttacgattaaagacgtccgggataaaaacggctatcttgaatcattaggcaagccgagaatcgcccaagtcaagcgggatgcggacattgccacggcagaagcggataaagagacgaggattaaacgcgcggccgctgataaagacgcaaaaaaatcagagctggagcgggcgacggaaatagctgaagcggaaaaaatcaatcagctgaaaatggcggaatacagaagagagcaggatacagcaaaagccaatgccgaccaggcatatgatcttgaaaccgcaaaagcgcgccagcaggtgacagagcaggaaatgcaaattaaaattattgagcggcaaaagcagattgaattggaggaaaaagaaattctgcgccgtgagcgccaatatgactctgaagtgaagaaaaaagccgatgctgaccgttactcggtggaacaagcggccgcggccgcaaaagcgaagcagctcgccgaagccgatgccgagcagtacagcatcgaagcgatggccaaggcggaagcggaacgcgtgagaattgacggtcttgctaaagcggaggctgaaaaggcgagaggagaaaccgaagcggaagtcatccgcctgaaaggtctcgcagaagcggaagctaaagaaaaaatcgccgacgcattcgaaaaatacgggcaggctgcaatccttgatatgattgtgaaaatgctgcctgaatacgcaaaacaagtctcagcgcctctttcaaacattgataaaattaccgtcgtggatacgggaggaagcggtgaaaacggcggggccaataaagtcacaggctacgcaaccaatttaatggccggtctccaggaaagcttaaaagcatcttccggaatcaatgtaaaagagctgattgagaatttttcaggcaaaggaaacataaaacaaagcataaatgaacttacaaaagaactgagtgattctaacgaacggcacagcccggaataaaaaaacagcaggcgtaaaccgcctgctgtttcagttcgtccgcttagcttcaagaagccgcggcgcagtcatgaataataagataaggacaatggccgaaaggataaaagaaggaatcatgtaagtcgcgttatagacggatgaataaatccagaccggcgtacccttcggagcatagcttccgaaaaagactgctccggagaccacatgcgccgcataccgcagcacactgccggtgaaaacaccgcctataacatacatcgttaaagcgcctctttttttattcaatgccgatgctcgtacaccggaagcgagcaagccgctgaaaccgagaactgcaaatgccgcgatataatcaagaaatagctgcaccgggtgctgcaaaaacaaattgccgatggcgatctggacaatccctgttaaaaagcctgtcgtaagcccggccttcactccccagcggaatgaaatcaaaaaaatcggaatcatcataatagagaccgaacccccttggggcatccggagaaacatgcctgagacaatgtccagaatgacagccgccccggtcataatcgctatttcaattaagcgcacaagctgtgttgaatgattcatagttttccccctggtcagacaaccgtatcaaggataaacaaaaaagcagcgcggggaaggatgggaaaaggtccgcgcgctgcttacataaactgcaaatcatttggctttgccacatccctacgccagcgttaactaacaggttcaaagggtcagaacaaaacgttcactctcagctttaatgctccccttgtggtcatcaagtatttagttcaatcttactatacaagaaaatataccaaaccacaagacagcttatctttctatagaagagaaactgaaataagtatgaaagaaaataattaatgattttttttaaaaaactattgtcatattttcaaaagggtgttatattattaaacgtcgctgatgaacagcagacaacaacgaaaagcttcggaaacaacttaaaaaaagttattgacataaaagaagctgggtggtaagataataaagctgcttcaataagcggtcatgatctttgaaaactaaacaagacaaaacgtacctgttaattcaaagttttaaataaatcgcacagtgatgtgcgtagtcagtcaaactaaggtctgcacgatgcagatcacacagacgttactgcaggatgcagtgaacttagtctgtgttccatttatcggagagtttgatcctggctcaggacgaacgctggcggcgtgcctaatacatgcaagtcgagcggacagatgggagcttgctccctgatgttagcggcggacgggtgagtaacacgtgggtaacctgcctgtaagactgggataactccgggaaaccggggctaataccggatggttgtctgaaccgcatggttcagacataaaaggtggcttcggctaccacttacagatggacccgcggcgcattagctagttggtgaggtaacggctcaccaaggcgacgatgcgtagccgacctgagagggtgatcggccacactgggactgagacacggcccagactcctacgggaggcagcagtagggaatcttccgcaatggacgaaagtctgacggagcaacgccgcgtgagtgatgaaggttttcggatcgtaaagctctgttgttagggaagaacaagtgccgttcaaatagggcggcaccttgacggtacctaaccagaaagccacggctaactacgtgccagcagccgcggtaatacgtaggtggcaagcgttgtccggaattattgggcgtaaagggctcgcaggcggtttcttaagtctgatgtgaaagcccccggctcaaccggggagggtcattggaaactggggaacttgagtgcagaagaggagagtggaattccacgtgtagcggtgaaatgcgtagagatgtggaggaacaccagtggcgaaggcgactctctggtctgtaactgacgctgaggagcgaaagcgtggggagcgaacaggattagataccctggtagtccacgccgtaaacgatgagtgctaagtgttagggggtttccgccccttagtgctgcagctaacgcattaagcactccgcctggggagtacggtcgcaagactgaaactcaaaggaattgacgggggcccgcacaagcggtggagcatgtggtttaattcgaagcaacgcgaagaaccttaccaggtcttgacatcctctgacaatcctagagataggacgtccccttcgggggcagagtgacaggtggtgcatggttgtcgtcagctcgtgtcgtgagatgttgggttaagtcccgcaacgagcgcaacccttgatcttagttgccagcattcagttgggcactctaaggtgactgccggtgacaaaccggaggaaggtggggatgacgtcaaatcatcatgccccttatgacctgggctacacacgtgctacaatggacagaacaaagggcagcgaaaccgcgaggttaagccaatcccacaaatctgttctcagttcggatcgcagtctgcaactcgactgcgtgaagctggaatcgctagtaatcgcggatcagcatgccgcggtgaatacgttcccgggccttgtacacaccgcccgtcacaccacgagagtttgtaacacccgaagtcggtgaggtaacctttatggagccagccgccgaaggtgggacagatgattggggtgaagtcgtaacaaggtagccgtatcggaaggtgcggctggatcacctcctttctaaggattttaacggaatataagaccttgggtcttataaacagaacgttccctgtcttgtttagttttgaaggatcattccttcaaaacataggaacacctgctaaatgcgccacttcctgtggcaacgcatgtgttagcatgtcctatgcgttgttctttgaaaactagataacagaagtaattcacattcaattagtaatgcaagatatcacgtagtgattctttttaacggttaagttagaaagggcgcacggtggatgccttggcactaggagccgatgaaggacgggacgaacaccgatatgcttcggggagctgtaagcaagctttgatccggagatttccgaatggggaaacccaccactcgtaatggagtggtatccatatctgaatacataggatatgagaaggcagacccggggaactgaaacatctaagtacccggaggaagagaaagcaaatgcgattccctgagtagcggcgagcgaaacgggaccagcccaaaccaagaggcttgcctcttggggttgtaggacactctgtacggagttacaaaggaacgaggtagatgaagaggtctggaaaggcccgccataggaggtaacagccctgtagtcaaaacttcgttctctcctgagtggatcctgagtacggcggaacacgtgaaattccgtcggaatccgggaggaccatctcccaaggctaaatactccctagtgaccgatagtgaaccagtaccgtgagggaaaggtgaaaagcaccccggaaggggagtgaaagagatcctgaaaccgtgtgcctacaagtagtcagagcccgttaacgggtgatggcgtgccttttgtagaatgaaccggcgagttacgatcccgtgcaaggttaagcagaagatgcggagccgcagcgaaagcgagtctgaatagggcgaattgagtacgtggtcgtagacccgaaaccaggtgatctacccatgtccagggtgaagttcaggtaacactgaatggaggcccgaacccacgcacgttgaaaagtgcggggatgaggtgtgggtaggggtgaaatgccaatcgaacctggagatagctggttctctccgaaatagctttagggctagcctcaaggtaagagtctcggaggtagagcactgattggactaggggcccctaccgggttaccgaattcagtcaaactccgaatgccgatgacttatccttgggagtcagactgcgagtgataagatccgtagtcgaaagggaaacagcccagaccgccagctaaggtcccaaagtatacgttaagtggaaaaggatgtggagttgcttagacaaccaggatgttggcttagaagcagccaccatttaaagagtgcgtaatagctcactggtcgagtgactctgcgccgaaaatgtaccggggctaaacgtatcaccgaagctgcggactgttcttcgaacagtggtaggagagcgttctaagggctgtgaagcaagaccggaaggacttgtggagcgcttagaagtgagaatgccggtatgagtagcgaaagaggggtgagaatcccctccaccgaatgcctaaggtttcctgaggaaggctcgtccgctcagggttagtcgggacctaagccgaggccgaaaggcgtaggcgatggataacaggttgatattcctgtaccacctcctcaccatttgagcaatggggggacgcaggaggatagggtaagcgcggtattggatatccgcgtccaagcagttaggctgggaaataggcaaatccgtttcccgtgaaggctgagctgtgatggcgagcgaattatagtagcgaagttcctgattccacactgccaagaaaagcctctagcgaggtgagaggtgcccgtaccgcaaaccgacacaggtaggcgaggagagaatcctaaggtgatcgagagaactctcgttaaggaactcggcaaaatgaccccgtaacttcgggagaaggggtgctctgttagggtgcaagcccgagagagccgcagtgaataggcccaggcgactgtttagcaaaaacacaggtctctgcgaagccgtaaggcgaagtataggggctgacgcctgcccggtgctggaaggttaagaggagcgcttagcgtaagcgaaggtgcgaattgaagccccagtaaacggcggccgtaactataacggtcctaaggtagcgaaattccttgtcgggtaagttccgacccgcacgaaaggcgcaacgatctgggcactgtctcaacgagagactcggtgaaattatagtacctgtgaagatgcaggttacccgcgacaggacggaaagaccccgtggagctttactgcagcctgatattgaatgttggtacagcttgtacaggataggtaggagccttggaaaccggagcgccagcttcggtggaggcatcggtgggatactaccctggctgtattgaccttctaacccgccgcccttatcgggcggggagacagtgtcaggtgggcagtttgactggggcggtcgcctcctaaaaggtaacggaggcgcccaaaggttccctcagaatggttggaaatcattcgcagagtgtaaaggcacaagggagcttgactgcgagacctacaagtcgagcagggacgaaagtcgggcttagtgatccggtggttccgcatggaagggccatcgctcaacggataaaagctaccccggggataacaggcttatctcccccaagagtccacatcgacggggaggtttggcacctcgatgtcggctcatcgcatcctggggctgtagtcggtcccaagggttgggctgttcgcccattaaagcggtacgcgagctgggttcagaacgtcgtgagacagttcggtccctatccgtcgcgggcgcaggaaatttgagaggagctgtccttagtacgagaggaccgggatggacgcaccgctggtgtaccagttgttctgccaagggcatcgctgggtagctatgtgcggacgggataagtgctgaaagcatctaagcatgaagcccccctcaagatgagatttcccattccgcaaggaagtaagatccctgaaagatgatcaggttgataggtctgaggtggaagtgtggcgacacatggagctgacagatactaatcgatcgaggacttaaccaatttgaatgtatgcttactgttatctagttttgagagaacactctcaatggtttggtggcgatagcgaagaggtcacacccgttcccatgccgaacacggaagttaagctcttcagcgccgatggtagtcgggggtttccccctgtgagagtaggacgccgccaagccattacacgtaagtgtaatatacggaggattagctcagctgggagagcatctgccttacaagcagagggtcggcggttcgagcccgtcatcctccaccattccaatcatacataagttggcgtattaggccggtgtagctcaattggtagagcaactgacttgtaatcagtaggttgggggttcaagtcctcttgccggcaccacttttatatgttatactatataagtctcttgtaataagagccattagctcagttggtagagcatctgacttttaatcagagggtcgaaggttcgagtccttcatggctcaccatgtttttcttgcggatgtggcggaattggcagacgcgctagaatcaggctctagtgtctttacagacgtgggggttcaagtcccttcatccgcattgccaaacgcggaagtagttcagtggtagaacatcaccttgccaaggtgggggtcgcgggttcgaatcccgtcttccgctccaactatactataccatccatgccggggtggtggaattggcagacacacaggacttaaaatcctgcggtaggtgactaccgtgccggttcaagtccggccctcggcacttattgttgcgcccgtagctcaattggatagagcgtttgactacggatcaaaaggttaggggttcgactcctctcgggcgcgccatacatacttttgaaaaacgggaagtagctcagcttggtagagcacatggtttgggaccatggggtcgcaggttcgaatcctgtcttcccgaccactttggggccttagctcagctgggagagcgcctgctttgcacgcaggaggtcagcggttcgatcccgctaggctccacttgattttaattgtttttggcggtgtagctcagctggctagagcgtacggttcatacccgtgaggtcgggggttcgatcccctccgccgctaccattggacctttagctcagttggttagagcagacggctcataaccgtccggtcgtaggttcgagtcctacaaggtccaccacttatacggaggaatacccaagtctggctgaagggatcggtcttgaaaaccgacaggggtgtcaaagcccgcgggggttcgaatccctcttcctccgccatatctaatttaattatcatcgcggggtggagcagttcggtagctcgtcgggctcataacccgaaggtcgcaggttcaaatcctgcccccgcaaccaaaaaatggtccggtagttcagttggttagaatgcctgcctgtcacgcaggaggtcgcgggttcgagtcccgtccggaccgccatttataaaaaggctcggtagctcagttggtagagcaacggactgaaaatccgtgtgtcggcggttcgattccgtcccgagccaccatttaatttaatattgttttggcggttgtggcgaagtggttaacgcaccagattgtggctctggcactcgtgggttcgattcccatcaatcgccccaaacaacatgcgggtgtagtttagtggtaaaacctcagccttccaagctgatgtcgtgggttcgattcccatcacccgctccatttttatattgtcatgggcctgtagctcagctggttagagcgcacgcctgataagcgtgaggtcggtggttcgagtccactcaggcccaccatgatgatttttccacagtagctcagtggtagagctatcggctgttaaccgatcggtcgcaggttcgaatcctgcctgtggagccatacggagaagtactcaagtggctgaagaggcgcccctgctaagggtgtaggtcgtgtaagcggcgcgagggttcaaatccctccttctccgccataaggcccgttggtcaagcggttaagacaccgccctttcacggcggtaacacgggttcgaatcccgtacgggtcattaaaaaaaccttgcatagtatgcaaggttttttattatgcgttcatagcgtaaatggtaaaagacaggtatgtggcaaaagcgctccataataaataaggaaccagaagccaggctgaagctttactgtatttaccggcaatgagcaacagaatgagtgttgtcacagccacaagcaggcaatcgatagatgcagcaagcaaatttttctgtgtgaattgaaaatagctgaatccttgattcacgatataattgatgagaagcatcacccaaaaagctttggattctttacatgaaaactttgcatatattaaggctgctgagagcgaaataagcgcaaacaaaaccgcccatatgatgccgatcactgatccgcccagcgtccagtcaggtttttgcagcgcgtcgtaccattcccggtcgatgggaaagagaaaccctgctaaagaaaacaagacatatgtaatgataaatacaataatcgcaccgatatacttctttttcatttgttccctccgtcattcaatgtcaatacgttagttccctttcttggaaagattaaaccgttcaaaaggttcatgcaccattaagtgtatgagttttcggtgtgaaaatgcagcaaaccaattatttgtattcaaaaaccccggcctgccggggttttaatcagcatgaaggtcgccaaaggtcgtcataattccttcttcgtccagttcctgctcatatttttcgtgtgccttgcttggatacacggaaatgttttttccggtaatatctgtcgcgataaagttttcataatcctcagcatagccgatgttttcttctgagttcattgtcatatccccatagctgagcggcggatcttctaaatcctgaggcgtttctgagtttccgtatccctcaacatcctgataagcatcttcactatcgtaagccgcccggattgattcatcatcatcaaattcaaactgtccgaacggtgtttcctcttcaatcggcctgtctttggaaacggcatcctgcgaggaatattccgccaatgtcgtagccgtcggcagagcttcaagtctgtcataaggaatgtccttgccgctgacttcacatgtgccgtatgtgccgttttcaatttgtttcagagagtaatcaatatcgcgaaggtgctccctttcatggtcgagcagagccaggtctttttcccgctcgtataattcggtcgcctgatcgccgggatgattgtcataggaagacaattcgccggatgattgatacgggaattcatcagttaactgaaattgatcattttctttaaagcggcttaaaatatcatctctggcttcttccaattctttttttaagtgtgtgatctgttcgtttgtaagcacatcaatccctcgtttctatgtgatgcttactgttagtatgaacgtttttacgcagaaaaatggtggataaaaatagtcattttcccacgaggaagtaaaaggatacagtgattgccgagagtggggaaagaaaattcaagtttgtttctttattcatttgcgcaaaaaggtttataataagaaatgcaggcattttgtcgtgctcaaatctgtgtgtttgacacaaattcatcacaggtgtattgtattaaaagcatttaacggattatggaggaatgtctcatggtgacaacggtgcagcatacgttccgagaggaagcagatcatgcattacataaagccaaacaagtcaaccatgctgtcttattgagctattcaagacgtattgcgtctttagaccctctatcatttttcaaagacggagcaaaaaaatataaaggcaaacgatttttttggtcagaacccggtagtgaattaacaatagtcggtcttggcacagaagcgctgttccaatcgaatgaaaaaaatggaaaacgttatcacgacgtttttgaacaatgggagcgctttaaaaagacggcttttcatattcatgaagaagaagaggcggcgcataccgcggtcggccctgtcttattcggcggtttttcatttaatcccgctgaagagagaggagacgaatggaacgggtttgaagaaggaatgttctttatcccctcactcatgctgacaaagacggcagacggcgattatttaaccgtcaatcaatgggcggcagacggtaatcaggcagaagatacgctgaaacgtctgaaatctttttcagaagcttttgcagtttcttcaattgagtatgaagaatatcctgttttaacaaaagcggaagaacttgatgtggaaaactggcttgaagccattaaaacagcaacaaatgatatgaaggcaaatcaatatgataaagtcgtgctggcaagggaagtcgttttgtcatatgatgggcctattccggcggagagcgttgtccgcaagcttttgacggaccaaacgacaagctatgtttttgcgattgagcagggagataaatgctttgtcggcgcttcaccggaacggctgatcaaaaaatcaggcaaagacgttatgtccacctgtctggcaggttcaattaagcgcggagaaaatcaacaagaagatgaccgtctcggcaaagagctgctgcatgacgaaaaaaatctcgcggaacatgattttgtggttaagatgatacacgattctttcttgtcgagctgcagtgatgtgaaaaagcctgcaggcccgcaattatataaaacaaaaagtgttcagcatctatatacgccgatcacaggcaatctgaaaacgtccgcttcgctgtttgatttaattgaaaagctgcatcccactccggcattgggaggagctcctcagcagaaagctgttgaagttatcgctgatattgaaccgatgacacgcggatggtatgcggctccgatcggctggatggacggcagggaaaacggagaatttgtcgtggctatccgatcagggctgattgaaggcaaaagtgcgcggcttttcgcaggctgcggcattgttgaagattcagatccgcaatcagaatatgaagaaacacaaattaaactaaagccgatgatctctgctttaggaggtgaaaggctttgacaaacccgattacacattatatcggaagctttattgatgaattcgcgctatcgggtgtcaccgacgcggttgtttgcccgggatcgaggtcaactcccctggcggttttggcggcggcccacccggatattcaagtccatatacagattgatgaacgatccgcaggttttttcgcactcggtcttgcaaaagcccgccagcgtccggtcatgctgatttgtacgtcaggaacggcagcggctaacttctatccggccgtgattgaagctcattattcaagagtgcctcttattgtcctgactgctgaccggcctcatgaattgagggaagtgggggcgcctcaggcgattaaccagcattttctgttcggtaactttgttaagtttttcacagactcagctcttcctgaggaaaaacctcaaatgcttagctatatcagaacattggccggcagatccgtaagtgaagccgggaagcgcccgatggggccagtccatatcaatgtgccgctcagagagcctttgatgccggatttatcagccggaccttttgaaagaatgagaaaggggaagcacgtctcagtcacaacagggattcagtcagctgatcaagactctctctgtcatattacagagcgtctcgcgggtaccgaaagaggtatgatcgtctgcggcgaaattcacggtgaagcagaaaagcagcaaatcatcgcgcttgccgagatgcttcagttcccgattttggctgatccgctttcaaacctccgaaacggggagcatgataagacgctgattattgatgcttatgactcgttcttaaaagatgaagaaataaaagaggcgctgcgccctgacgctgtgatccgcttcggtccgatgccggtttccaaaccgctctttttatggctcagagacgatcctgccattgagcagtttatcgtcgatgaagacggaggatggagagatcccacccaggccggcgcgcatatgattcattgccatccgtctgtgtttttggaagcggtccgttcagctgaaaccggaaaacggccgtccggatggcttgagaaatggcaatttgtcaatgaccggttccggagtcatttacaggccgcgagcatggatgatttatcatttgaaggaaatgtatatcgtcagcttcagcaccttgtccctgaaggcagttcgatttttgtcggcaacagcatgccgatccgcgacgtggatactttctttgaaaaacaagatcgttccttccgtgtctatgccaaccgcggcgctaacggcattgacggagttgtctcctcggctatgggactgtgtgaaggtacaaaagctcctgtcacgcttgtcattggagatttatcgttttatcatgatttaaacgggctgttagcggctaaaaaacttggaattccgcttacggttattttaataaacaatgatggcggcgggattttctcgtttttgccgcaggcatctgataagactcattttgaagaactgttcggtacgccgacgggtcttgatttccggcatgccgccgcactgtatggcgggacgtatacttgtcctgagacatgggaagcatttaaggatgcgtatcagccgcaggcggacaagcccggacttcatataatcgagctgaaaacagatcggacatcaagagttcaattccatcgcgatctgctgcaggccgcagtgcgggaagtgaaaaaagaatggaaactgtaacagttaaaacggccgacggcgtatgctatcgtgctgctgatagcggacacggacacgaatcgtctgaagctattgtttgtctgcatggatttacgggcagcaaagaatcatggatgtttttacgcggcatgtttcccggcgagcgaatggtgatgattgactgcctgggtcacggggagacagacgcgcctgtgcaagcggcaaggtatagtgcgagccggcaggttgcggaccttgccgccgtttttgatcaattaaaacttcacaaagtgaaacttattggttattctatggggggaagacttgcgtattcctttgcacaggcatttccgcatcgggtgtcagcgcttgttttggaaagtacaaccccgggcctcagcacgcttcaggaacgcaaaaaacggattcagtcagaccggaagcttgctgactttatattgcgggaaggtgtaacatcgtttgttgattattgggagagcattccgttgtttgccacgcagctttctcttccggacagcgtaaaggcgtccatccgtgccggcaggctgaagaataatccgtccggacttgcaggaagcctgctcggaatggggacaggctcacagccttcctggtgggaggcattacaccgcatcaaggcgcccgtcctgctcatatgcggtgaatgggatgaaaagttttgcgctattaatcaaaaggtgcataacctgctcccatcaagtaaaatagaggttgtcaaacaggcggggcacacggtacatgtggaacagccgcgaatttttggtaagatagtaagtgagtttttatacggcttgtaaagcataaagaaaatagcttttcggccggactcaggcaaaaatgaaggaggtcatatcaatggctgcagaatggaaaagtgaacgtcagtacgatgaaatcctgtacgagacgtataacggtattgcaaaaataacaattaaccgcccggaggtacataacgcatttactcctaagacggtatcagaaatgattgacgcgtttgcttgtgcgcgtgatgactccaatattggtgtcatcgttcttgcgggagcgggagataaagcattctgttcaggcggagaccaaaaagtccgcggtcacggcggatatgtcggagacgatcaaatcccgcgtctgaatgtgcttgatcttcagcgtttgatccgtgtgattcctaaaccggtcgtagcgatggtatcaggctatgccatcggcggaggccatgtgcttcatatcgtctgtgatttaacgattgcggccgataacgcgattttcggtcaaaccggcccgaaagtgggtagctttgatgccggttacggctcaggttacctggcgcgtatcgtcggacataagaaagcccgtgaaatctggtacctgtgccgtcaatacaacgcgcaggaagcgctcgacatggggcttgtcaatacggttgtcccattagagaaacttgaagaggaaacaattaaatggtgtgaagaaatgcttgagaaaagccctacagcccttcgtttccttaaagcggcatttaacgctgatacagacggcctcgccggaattcagcaatttgcaggagatgcaacgcttctttattacacgactgacgaagcgaaagaaggccgtgattcctttaaagagaaacgcagtcccgatttcggtcaattccctcgttttccgtgatcagatgacactacgaaacagcttgagccgctctggtccaagctgttttcttttcaaaaacagtacttttacctcggagatgataacatgctgacagaacagccgaattggctcattcaaagggctcagctgacaccggagagaatcgctctcatatttgaaaacaaacagatgacattcagagaattatatcatgcttctaaacaaatggccgcgcggctgtccaaatactgctcgcttaaaaaaggagacagggccgcgattttgctttctaacagaccggaaatggtttatgccgttcacgcctgcttcttattaggggcggaagctgtgctgttgaatacgaagctctcaaaacaggaacggttgtttcagctcgaagattcacaggcaaagcttttattgacggaggacggtttttgccgcgaagaatatgaatctgcggtcgccaccgcagatgtggacgagctgcaggctgaagaggcgggtgacatggagccggaagcttatgtaacgcttgatgatacggcgactcttatgtatacgtcaggaacaacaggaaggccgaaaggggtgcagcagactttcggtaatcattattccagcgctgtatcgtctgcgctgaatctgggggtcacggagcgggaccgctggcttattgcgctgccgctgtttcatatcagcggtctgtctgcgctgtttaagtcggtcatttacggcatgcccgtcgtgcttcatcaaaaattctctgtcactgatgtgctggacagcatcagctcccatcaggtcacgatcatttcagcggtgcagaccatgctctcgggcctgcttgcggaaactgaacaatgtcctgaatcactgcgctgcattctgcttggcgggggtccggcaccgctgccgctccttgaagaatgccgcaggaaacaatttccggtattccaatcttacggcttgactgaaacctgctcacagattgtcacactttctccggaattcagcatggacaagctcggctcggccggtaaaccgctgttttcatgcgaaattagaattgaaaaagacggaaacccttgtgcgccgtttgaacatggtgaaattacggtgaaaggcccgaatgtaatgaaagggtattatcatcgtgacgacgcgaaccaggccgcttttcataatggatggttcaaaacgggcgatcttggctatttggatgatgaagggtttttatacgtgctggacaggcggtcggacctcatcatttcaggcggagagaacatctaccccgcagaagtggaagcggcgctgcttgcccatccggctgtagcggaggccggtgtttcgggagccgaagatccgaagtgggggaaagtgccgcatgcttttctcgtgctgacttcttctgtcagttctgaggagctgaccgccttttgccgtgagcggcttgcaaaatataaaataccagctgcttttttcaaggttgacgggctcccgcggaacgcgtccaataaactgatgaggcatcggctgaatgagcttcgtaaaggagaattgtcatgattaagattgaaaaaatcaccctttatcatgtaagtatgaggctgaaaaaaccgtttaaaacaagtattgaaacgctgcaggatcgtaaatttttgatcgtggaagcgatcgacgaaaccgggagaaccggctggggggaggtatcggcgttttcttctccgtggtatacagaagaaacgattcagacatgcgcgcatatgctgagagattttttcatcccaaatgtcgtaggccgcgcgtttttccatccgtcagaagtgcctgacagtctcgcgcgtttcaaaggaaaccgcatggcaaaagcggggcttgaatcagccgtgtgggatctatatgccaagaaaaaggggatatctctcgcagaagccttagggggcaaaagagataaagtgcccgccggcgtggcggtgggtctggcttcggctgatgagatgcttcgggaaattgagcaatacgtaaaagaaggttatcaacgtataaaaataaaaattcagcccggccatgacgttgatctggtcagagccatccgcagccgttttccgaacgtgccgctgatggcggatgccaactcggcttatgaactgaaagacatcagcaggctgaaagagttggatgaattccagctcatgatgatagaacagccgcttcaggcagatgatattgtcgatcaccgccacctgcagaaacacttaagaaccgcggtatgccttgatgaaagcatatgctcttatgatgacgcaaggcgggcgattgagcttgggagctgtaaaatcattaacataaaaccggcgcgtgtaggaggcctgacagaggcattaaaaatacatgacttatgcagagagcatcacatgccggtttggtgcggcggaatgtttgaaaccggcatttcgagagcgcagacagtcgcgcttgcttcgctgccgcaatttacgataccgggtgatatttcctcatcagaccgatactgggaggaggatattgtcactcccgatatccgtatcgaagagggattcatctctgtcccggacggtcccggactaggtgttgaagtcaatcaggaaataatgagaaaatacgtcacccaaatggacgtttttacgacaaacaactgataaaaagacatttcagcgagttgagctgcctgtacgctgctgttatattgaagctgttcattatcaccccttcccccgtttgaaccggctgtatcagccggtttttttaataggcggatgcgatgatttttttattcttcaaacagtgccggctttacaacgcaggtgctgctttccggctggggcaaacatgtacatcttgataaaaaattctgagcttgtcatgaatgcgatactgattgtaccgtctgccgcctatatttgccgccgaaccgcctttttgccatgcttctcatccgcgcggttttctccggctcagggaggcttgcggcggaaatgaaaaagagctgtataaaacagctcttttcttttataaatcttgcggtttaaaggttttgcaatccgtttcttcacttttttcagcggtttcgcctgtatggctgaccacataaatagcgtcggccgtgcatttgtttcctctgccccaatatgaacagttattgacttcacacagaattttttggtccatgctggctcccctccaagataaaaggtacgccattagtatgagccgccctgatttttgttattcctcctggcggatataacgtctgtctttcataaagagcttccagaagaaataaaacccggggaacaaaatgatgaaagcgacgatatacgtcataaacagcgccctgaaggttgccggctccgtaaatcctgacatgaccgtaatatccggataaatcatataaggaagatgagcccgtccgtatgcatagcttgccagaaagtattggagcgcaatggcgatcatggcgattctcggtttgccgaggttgcggccgaagcgcttattcggcaaaaacagagccacgccggcaatgataaatgtaatgacagacagaatgagccatgtcttgtctttcatcatccccgtatacagccagccggcttcagagcgtaatgtcagcataatgaagaaggcaaacagaagcgacagcggccctgttattaaagagctccgtctgtagatgcggtacgcatgctcctcttccgcaacatttgaaaaatcggccagaagcagtgaagataaaaataaagtgcttaaaatggcaaagccgataaacgcatacgcattaagacttgtaaagacatttgccaaattcaggtgatacactccgcccgtcttctcaataaaccctccgtgtgtgaccggaaggaccaaaatcagcacagcgggaataatgaagcctgaaattccggagatatatctcatgatttttctttccttcgccgtattggagaagacgagaaagccgctgcggatggctaagagcagcaaaataatacttcccgggatcaataaaacggttcccagcacgaaggttgcccctggaaagaagctgaatagggcgacaacgatcgcgacgataaagacgttggtcacttcccatgtcggggacaaataacggttggcgatgtttgtcgcctttgtttgttctttatttaaatatatcatcgaccaaaagccggctccgaagtccatcgttgccatgaccgcgtagataaacacgaagccccatacgattgatatcgcaatgagagcatccatggtaatgtccatttcaattcagccctttctattgttaggattccgccgcttttacatcctcctcaacaggatgtttgcggaaataataaagcagcacataaatgactgcggctgccaaaatggcgtaaaccactgtgaacaggatgaacagcaaaccgattgaaccggttgtcgtgacgacatcagacgttttcaggagatggtaaatcacccatggctgccgccccgtacaagcgaatatccacccgaattcaattccgatcagactgagcggtcctgcggttaaaaataaaatcaaaagccaagtcggaaagctgtctttctttaaaatttttctccacacgatgccgatgatggagtacaaaatgagcagcatcccgatgccgaccattccgttaaacagtgtatggatgaataaaggcggccactcgtctttcggaaacgcgttcaatcctttgacgacggtatcaaagctgtttgcggccaaaaagcttaaagcccacggcacttctatcgcccattttactttttcttcttttgcatcagtaaaacccccgatcgcaagcggagcgtgtgatctagtttcaaacagcccttctgcgcccgcaagcttctcaggctggtattcgtaaagaagctgggctgactcgtgaccgtttaaagaagcaataatagagaatatcccgccgatcgttaaagcgagcagcagcgcttttcggtgaaagcggtatacctgctcctgttttctcgttctcagcattttataagccgcaactgacgcgacgataaatgcaccggtcatgaaagccgtcagtacgacatggcccgcggtggtgaaaaagcttggattaaaaaacgctgcccacggttcgacgtcagtgattttgccgtttaaaattttaaagccggccggcgttccttcaaatgcgtgaacatttgtgattaagacggcggatgccgcggcgccgatcaaaacgaaaataacggcaatgatgcgcatcgccggagtcagccggtcagcggcgtagacataaatggacataaacagcgcttcgataaagaaagcataaatttcaatctgaaacggaagtgacatcaccctgccgatgatctccatgaatccgggccacaaaagggcaagctgtgtacccgcgatcgttccggtcggtatcgccacgccgagcagaacagcctgcgccttcgtccaccttttcgccataatggcataatgcggatcttttgttttttgataaatcaattcggccattaaaatcatcagaggcaagccgacaccaagcgtcgcaaaaataatatgaaagcccatggttgtcccgaacagacttctggctaatactaaatcatccacgatcataaaccgcctttctaaattaccgttttatgtaatgtggttatattatttgctgaagcgattagattattcttccgattccatatatgtgcagggtttagaaatcaagggatcagggcatatatgattgacaagcgcctatttaaggtttagaataaaacgtaattattacgatttaagaaagggagatcaccatgaaaaaagatattcatccggataaccaccaagtgatttttcaagatgtgaacagcggctaccgctttttaagccattctacgaaaacgtcagaggaaacggcagagtgggaagacggaaaaacatacccgctgattaaagtggaagtcagctcagatacgcatccgttttatacgggccgccaaaaattcaacgaaaaaggcgggagagtcgaacagttcaacaaaaaatacaatatggggaaataagacaagcccaatagggtttgtcttatttattgagcactttatcatctcgtgcggggagtgacgaaatgacccgccttatgttatattgtgaataaaaaagcagaaaggaaacaccaagatgagtcttctaaacgatatcatgcaatttaatgagcagttcactaaaaacaaagattatgaaaaataccaaacatctaaattcccggataaaaagatggcaattttgtcctgtatggacacacgtcttgtagaattgcttccgcatgcgatgaacatgcgaaacggcgatgtgaaaattattaaaagtgccggcgcgcttgtcgcccacccgttcggaagcatcatgcgcagccttttagtggccgtatacgaattaaacgctgatgaagtctgcgttatcggccaccatgattgcggcatgagcaaaatcaacagcgaggatatgcttgataaaattatcgaccgcggtattccgaaagagcggattgacatgctgaagcactcaggtgttgatcttgatcaatggctgaaaagctttgattcagtagaagcgagtgttacagacagcgtaaacgtcattaaacaccatccgctattccctgacaatgtcccggtgcacggtctggtgattgatcctgaaaccggtaaacttgatctggtgatcgacggctaccagcatatggactaatgttttcgttttttgtccggtacgggatcaacaccgcccggatgaaaagggtggcactttaaaatccgcttcagtgtcagccatccgccttttaatgcgccgtgagtcttgacggcttcgattccgtactgtgaacacgtcggataaaagcggcatgacggcggcgtcagcggagagatgaacttctggtatccgcggatgagcgcaatcattatggttttcattaaaaaaccacctttctgatgctagtatagaaaaaaaatttcagattgaaaagctttcgccacaattcttatcggaaaactgtgttataatggatgcatattctgaaaaaaagggagtgccattatgccttcagtagaaagttttgagctagaccataatgcggttgtggctccgtatgtaagacattgcggagtgcataaagtcggaacagacggcgtcgtgaataagtttgacattcgcttctgccagccgaacaaacaggcgatgaagccggatacgattcatacgcttgagcacttgcttgcgtttacgattcgcacacattctgagaaatacgatcacttcgacatcatagatatctcaccgatgggctgccagacaggctattatcttgttgtcagcggcgagcctacagcggaagaaattgtagacctgctagacgctacgctgaaagaagccatcgatattacggagattccggcggccaacgaaaaacagtgcggccaggcgaaacttcatgatttagaaggcgcgaaacggctgatgcgtttctggctgtcacaagataaagaagatttgctgaaagtgttcggataaaaaacaggcctttttgctgacatgcaaaaaggcttttttacatatttctaaaaaatgtcacaccttatgtgtaagcgtttgctaaaatagaagcaaacatgaaggagtgatgggatgaaacgggctgtattggcaggtatgtgcggtatggtatttctattatcttcctgcgggggcaattcggacaaaaccgccgcggatgaggagcctaaagcgcttgaggtcaagcttacaggaccggaaacggcagcaccgcatgaaaaaacggaatacaaggcggaggttttttacggcggcaagcgtgtcacggatgcggatgaagtcatgtttgaagtatggaaagaaggaaaaaaaggcagcagcaaaacaagcaaggccaaggaggaaaaaggggcgtatcacctgcggactgaatttgatgaagagggtgtgtataccgttcaatcccacgtaacggcaaaacagcagcataatatgccgactgtaaaagtacgtgtcggggatgctgaagctgccgatgattcctccggccatgaggaacagacgcatcatcattaaggattgtttttatccgtcaagccttttgatgcgtcctccggcgggtcaatcgtatgttttacgttataagctcttacagtcgaccagatggataaaagcagcacggcgagcacgataagaaagccgaagctcagaagaagcagcatgaaatccctcctttttaacaaatcataacatattttccatccgtaaaatcaagggctaaaaatttatgttttaacacacgatatatagggtatatcaatagtaaatcaaaggaggaagataggcatgtcagaaaaactattggaagcggtcaataaacaagttgcaaactggacggtcatgtatgtgaaattacataactatcattggtacgtcaaagggaaggactttttcacattgcacgaaaagttcgaggagctgtataacgaaacggctacatatattgatgatctggcagaacgtctgctggcattgaacggcaagccgatcggcacaatgacggaatcattgaagagtgcttctataaaagaggcggaaggcaatgagagcgcagaacaaatggtacagaacatttatgatgatttcactgtcattgcggaagagctgaaaagcggcatggatctcgcagatgaggtcggagacgaaacgaccggagatatgctgcttgccattcaccagaatatcgaaaaacataattggatgctgaaagcgtatttaggataatcaacaagggaagaccggggctataaagcactcggtcttttatttggctgccgaagagaggtgttgtccatttttctgaaaaatccagtccgttccattcacttttcatagaataatgtaaggccgtttctgtgaaaggatgttggatcaagtgggcaaagactttggcatcttttcgttttttgcagtgatcgtgtcggcagcggggtttttctttggcggttttcagtattcgtttctgattttgctatcggtcatggcgattgagtttatcagtacaagcttaaaagaatctcttttgcagcagctgagcgcaagaaagctttttgcgcggctggtcaaaaaaatcgtgaccctggcattagtctcagtttgccatttttttgatcagctgcttcattcagaaggcgccatccgcaatttggctattatgttttatatcttatacgaatcggttcagatcgtgattacggcaagctcgctgggcatcccggttccgcaggtgctcgtcgacctattggatactttgaaaaataaattcaagcgcaaaccgtaacatttgcttcaaaggaggctatactagcgggtatgatggttttcctctgaatttttgataaagggcttccgaacaaacgcaactgtggtatgatgtatggaagatatgaaggaacggattagagggataaacatgtacgagtttaaagactattatcagaatactgttcagctctcctttgaacaccagcctttttcagacagcccgaagcatgtatgggtcatatgccgatatggagataagtggcttttgactgagcacgaagaccgggggtttgaatttccgggcggaaaagtggagccgatggaatgtgcggaggaagcggccctgcgcgaggtgaaagaagaaaccggcgccgcggtaagacatctgaagtacgtcggacagtataaagttctcggcagggaaaaggtaatcgtgaagaatatttattttgccgatattgaaaagcttgaaaaacaggctgactattttgaaacaaaggggccggtgctgttcagcgaactgccggagaatctcccccgaaataaaaaattcagtttcattatgaaagattcggtgcttccgatcagtctgaaaaagctgaaagaggacggcgtatttcaatcataaaaaacggagacccggcgcttacgcacgggtcttttttatatttttcctttcgtccattttctttctaacagttcgactccctgatacatcaatgtcgcaaaaatcgcgatgatcagaaggcttaagaacacaagagtgaaattgaagacctggaatccgtaaatgatcatgtagcccagacctttttcggaaacgagaaactcgccgacgatgacaccgacccaggataaaccgacgttcactttaagcgcggaaataatcgcgggggcgcatgccggcagaatgacttctttaaacatgatgcttcttttcgctccgaaggttttcatcaccttaatatagttttcatccacttcctgaaaagccgtaaagacgacgattgtcgtgataatgacactgatgactgctcccatggcgacaatgcttgtgaaattcggtccgagtgccacgatgagaatcggtccgagtgcgaccttcggcatcgcgtttaaaatgacgaggtacgggtctaaaacccgggcgagtctgtttgaccaccataacagagcggcgaggcatgtgccgagaagcgtgccgagcaaaaagccgagaacggtttctcctaaggttacgccgatgtgcgccgcaagggatccgtccgcaatcttttcaactaaaagcctgcaaacggcggagggtgagctgaagattaacggatcgatccagcccgccctgctcgatatttcccacccggcaaaaaatacgatgaaaatggcggcctgatacgcacggatccggagcttttctttttggtgtcttttcttaaactgctgatgaagctgttcaatcgtgccgctgctgtttttcaagggaattcagctccttccatatggtttgaaacagcggctgaaaggccggatcctgacgcgcgtcaaacggatctaaagccgcgagctccttaggcacggtgaatatttggtggatggtgcccggctgattcgaaaataaatagatcgtatcgctcatggcgatggcttcaccgatatcgtgggtgacgagcacggcggttttttgaaaatcctttaatgttctgaagacaaggttttccaaagaaagcttcgtttgaaagtccagcgcggaaaacggttcatcaaggagcagcagtccagggtccggcgcaagagttctggcaagtgccgcccgctgccgcattccgcctgagagctctttcggatatttcttttcaacgccgattaatccgagcttaggcagaaggctgagaacttcagctcttttttcttctgttaatgtttttgaaatgtgtaaaccgagcagcacgttttcctcaatcgatttccaaggaaataaataatcctgctgaagcatataaccgatttggtgttctttatggttcggcacgcttccttcgatcagcacccggccttgcgcaggggtgataaggccggccagaatggacaggagtgttgtttttccgcatccgctcggcccgagaaaggagatgaaatcccctttttcaatctgaaaatgtatatctttcacggcggttgtcttttctttaagcgagaaataagtatgtgttacatgatccacatgtaaaaaagacattcatgttcctcctattgttctgaggtgacttttttggcgatttttgtgttgacgagtttgctgtacggaatgtgtttcgggagctctccggcttcatccataatagattgaagcagttcccattcatccttttgcagaactgggtctgcagagaatgacttttgttttttatagcgctctatcgatgtttcgataatggccgggtctgtatcggcaaattccttctgaatcgtttttgcgatgtctttggccggatggctttccacccattgctgggcgcgatagatggcgcgggtgaatttttccgccgtcttttcattgtttttcaaataactttcttttgccataaaggttgtgtatggcacttggccggaagcttctccgaaggatgcgacgatatgaccgatgccttctttttcaaattgggatgccgtcggttcaaacagctgcacataatcacccgttccggatgcgaatgcgttggaaatattggcgaaatcaatgttttgaacgaggttaatgtcttttttcggctctatgtgattctttttcaggacgtactcaccggccatttggggcatgccgccttttcgctggccgagaaatgtttttccttttaaatcgttccatttgaatgatttctcatccttccgcgacacgagaaatgtgccatccgtctgcgtcagctgcgcgaaattgatgaccggatcttttgctccctgcgcctccacgtaaatggatgtttcagaaccgaccagcgcgatgtctgacccgtttgacaaaagcgatgtcatcgttttgtctccgccccatgttgtttgaagtgacacttggagcccttcttttttaaagaaatcttttgcttcagcgacatacagaggcgtatagaagatggagtgtgtgacttccgccacctttaccttcgtcagactttcttcctgtctgcaagccggaagaatgagcaggaaaaaggcgcatatgacaaaaacgcagcccgctttgagccatttgttcacggtgtaacctccttgttttaagcgttaaaataaccttttctgctttacatatcgtatgatgggtataaaaaatgtgtgagtgcccatattcacgttgggaaagaataaaaaaactgatgatctaaggaggcgcattgttttgctggtagaaaagaaaaggttcccgtctccgagtccgcatgtccgcctctttgcggtatgctatgagtcagaagggctgaaggtaaaggggctccttgccgagcctgcggcgccgggaacatatgacggttttttatatttgcgcggcggcataaaaaatgtcggcatggtacgccccgggagaatcgttcaattcgcttcccaaggctttgtcgtgtttgcgccttattacagaggcaaccagggcggcgagggaaatgaagattttgcgggagaggacagagaggacgcgttttccgctttccgcctgcttcgggagcatccgaacgtcagggaagggcgggtgcatattttcggtttttcccggggcggaatcatggggcttttgaccgcgattgaaatggggcatcaagcggcttcactcgtttcatggggcggtgtgagcgatatggtgctgacttatgaagagcggaaggatatgcggcggatgatgaagcgggtgatcggcggcacgccgaaaaaggtgccggatgaatacagatggcgttcgccgtttgaaaaagcagaccgcattcaggcccctgtgctgctcatccatggagagaatgatgaaaatgtttcgatcgaacacgcccggatgatcgaggacaagctgaaagaggcggggaaaccggtggaaacttggtattacagcggttttacgcattattttccgccgcaggaaaacagacgcattgtccggcggctggcggaatggatgaagacacggtaagatgcctgatttatgatatgataataaagaataagagaatgaaaggggattttcattttgggaatgcctgttgaatttaataccatgattgtgacaaaaggcaatgaaaaacggatagaggaaaatatctttttattggagaaagagggctaccgcgtctatcctcttgatattccgatggacgtgcgcaaaacgaaaaccggcgagaaatccggcaccggcgaggtccagaagctcgaatgggcgaacggccggacaagcattacatacagactcacttcgcttcattcgacaaactgaaaaaacaaaagccgagggcataaacgcccttggcttttttgattacacgagaggtccgccggttttggcaatcgagtctgcatgggaaaactttttaaagttttctttaaactcattggctaaaaacagcgctttttcgttgtatgcttgtttatcgctccatgtgttttcaggctgaagaacttcatccggcacgcccggaacatgaacgggactgtgcaggccgaaaatgctgtctgccgtcatgtcagtctggttcagtctgccgtcaatagcggccttgaccatcgctcttgtatacgaaagtttcatccgttctccgactccgtaccctccgccggtccagcctgtgttgaccaggaagacttgaacgccgtgttcgtcgattttacgcccgagcatttcggcatatacatgcgccggaagcggaaggaacggtgaaccgaagcacgtcgagaaagtcgtttgcggagatgtcacgccgcgttcggttcccgcgagtttactggtgtatccgcttaagaagtgatacatcgcctgttccttcgtcagtttgctgatcggaggaagcacgccgaatgcgtccgccgttagaaagacgatcgcctgcggatggccggcaatgctcggctgcacgatattgccgatcatctcaatcggatatgcggctcttgtgttttccgtgtagaaggaattgtcgtaatccgcttcacccgttttttcatcaagcacgacattctcaagaacagacccgaagcggatcgcacgaaaaatctgcggttctttttcctcgctcagattgatacatttagcgtaacatccgccttcaatgttgaaaacgccggaatctgaccagccgtgctcgtcatctccgatcagtttgcggtccgcatcggctgaaagcgtcgttttccctgtgccggaaaggccgaaaaacagggcgacatcgcctttttcaccgacgttggctgagcagtgcatcggcagtatatcctgctgcggaagcaggaagttcataatggagaatattgattttttcatttctccggcgtattcggtgcccccgattaaaatgacgcgcttttcgaaagagacaatgataaatgtttccgaatgcgtgccgtccgtctccgggtctgctttaaaatgcggagctgagagaatggtgaaaggctgcgcttgcgggtctctttcatccgtttccggtctgataaacagctggcgcgcgaataaattgtgccacgcaaattcatttacgaccgtaatcggcagtctgtatttttcatccgctcccgcgaatccttcaaacacaaacagttcatcccgctgttttaagtagctgacgactttggcgtacagcttttcaaacgcctcttcagaaatgggctgattcaccgcgccccaatcaatttgattttctgtgctttgttcacggacgataaatttatctttaggtgaccggcctgtatatgcgccggtagtggcgcgtacggcgcccgttgatgtcagcgttccttcatttcggctgatcactttttcggtaagttttggagccgataaattatgatgcacattcggacttgcaagtaatgcttgaagatctgcggttaaatcaactaatttcataaaaaccttcctttgccggtttatttgtatttcgctgaatgtggaattagtataacatatatctgaaaatagtctatactatttacggttttttgtttgtgtttttccattgcttcccgaaataaaggcgcgcaatcgctttaattcatattgacactttccgcccttttacgataagatatttcattgagcggatactcttatcccgagctggcggagggacaggcccgatgaagcccagcaaccggtttctctgtaaaaaagcaggtgaaaacactgtgggaaaccaaggtgctaacctgatgcaaggtttaatattttccttgagcgataagagtgaaaggcacacagaccaaaccctttcctcgagtggaaaaggtttttttatttcataaaatatgccaattaacattctctgatatagtatgacattgtattaagagggagcgagttccgtatcatatgagaaggtcttgcaaaagatcttttttcaggaggaaaagtgaatgagtaaaaaccgtcgactatttacatctgaatctgttactgagggtcatccggacaaaatctgtgaccaaatttctgacagtatcttagatgagattttaaaaaatgacccgaacgcgcgcgtggcctgcgaaacatctgtaacgacaggacttgtgctggtaagcggagagattactacgtcaacatacgttgacattccgaaaacagtccgtgaaacgattaaagaaatcggctacacacgcgccaaatacggatttgatgcggagacttgcgctgttttaacatcaattgatgaacagtctgcggatatcgcaatgggtgtcgatcaggcacttgaagcgcgtgaaggcacaatgagcgatgctgaaatcgaagcaatcggagcgggagaccaaggcctgatgtttggttatgcgtgtaacgaaacgaaagagcttatgccgcttccgatctctttggcgcataaactagcccgccgtttgagcgaagtccgcaaagaagacattcttccgtaccttcgccctgacggcaaaacgcaagttaccgttgaatatgatgaaaacaacaagccggtccgcatcgacgcgatcgttatttcaactcagcaccacccggaaattacgcttgagcagattcagcgcaatctgaaagagcatgtcattaaccctgtcgtgcctgaggaactgatcgatgaagaaacaaaatacttcatcaaccctacgggacgtttcgtaatcggcgggcctcaaggtgatgcgggtcttacgggccgtaaaatcatcgttgacacatacggcggatatgcacgtcacggcggcggcgcattctccggtaaggatgcgacgaaggtagaccgttcagcggcatacgctgcgagatacgtagcgaaaaacatcgtggcagcaggtcttgctgattcttgtgaagtgcagcttgcatacgcaatcggcgtggcacagcctgtttctatttccatcaatacatttgatacaggaaaagcttctgaagaaaaactgatcgaagtcgtacggaataacttcgacctgagacctgccggcattattaaaatgcttgatctgcgccgcccgatctataagcagacagctgcttacggccacttcggacgtcatgatgtggatcttccttgggagcgtactgacaaggcggatgcgcttcgcaaagaagcactaggagaataattttatagccgcttacttaagcggctttccctttttgtagatgctgccatgcttattttttacatagcgtgaaaccaatggcgtaacaaagcgtctataaaaagggggtccaattagaaaattacacttatggaggctatactatgtgtggatttgtcggtgtttttaataagcatccattaactcaaaccgcagatcaagaagagctaatcaaacaaatgaaccaaatgatcgttcaccgcggtcctgacagcgatgggtattatcatgacgagcacgtcggattcggcttcagacggctcagtattattgacgtagaaaacggcggacagcctttatcatatgaagacgaaaaatattggatcatttttaacggcgaaatctataactacattgaattgagagaagagcttgaagcgaaaggctacactttcaatacagattccgataccgaagtgctccttgcgacataccgtcattataaagaagaagccgcttcaaagcttcgcggaatgtttgcgtttttaatctggaacaaagctgaccgcgtcatgtacggcgcgagagacccgttcggaattaaaccgctgtattacacaaccatcggggacaaagtatattttgcatctgaaagaaagagtttaatggccgctcaaaacggtattgatcttgatacagcttctttacagcaatatatgtctttccaattcgttcctgaaccgagcacgcttgacgctgaagtgaaaaaagtcgagccgggcagccagtttacgatccgcccggaaggcgacatcgcgtttaaaacatatttcaaagcgaacttcaagcctgttcagtctgatgaagataaattggtgaaagaagtcagagacgcaatctttgactctgtcaaagttcacatgagaagtgacgttcctgtcggttcgtttctatccggcggtatcgactcttcttttatcgtttcagttgcgaaagaatttcacccgagccttaaaacattttccgtcggttttgagcagcagggctttagtgaggttgacgtagcgaaggaaacggctgccgcgcttggtattgaaaatatcagcaaagtcatttctcctgaggagtatatgaacgagcttccgaaaatcgtctggcactttgatgacccgcttgcagatccggcggcgattcctttgtactttgtcgcgaaagaagcgaaaaagcatgtaacggtcgcgttatccggggaaggcgcggacgagctgttcggcgggtacaatatttaccgcgaaccgctttcgcttaaaccgtttgaacgcattccgtccggtctgaaaaaaatgcttcttcatgtggcgtccgtcatgcctgaaggaatgagagggaaaagcctcttagtccgcggctgcacaccgcttgaggagcgctatatcggtaatgcgaagatttttgaagagcccgtgaaaaaacagctgctcaaacattacaatccagagctttcataccgtgatgtcacgaagccgtactttacggaaagccgttcatacagcgacataaataaaatgcagtatgttgacatccatacgtggatgcgcggcgacatcctgttaaaggctgacaaaatgacgatggccaactcattggaactgcgcgtgccgttccttgataaagtcgtgtttgacgtagcttcaaaaattccggatgaattgaaaacgaaaaacggcacgacgaaataccttctgcgcaaagctgctgaaggggtagtgcctgatcatgtgcttaaccgcaaaaaactcggcttccctgtgccgatccgccactggctgaaaaatgaaatgaacgaatgggttcgcaacatcattcgcgaaagtgaaacagacgcttatattgaaaaggattatgtccttcagcttctggaagatcattgtgccgacagagcggacaacagccgcaaaatctggaccgtgctgatcttcatgatctggcacagcatcaatgtcgaaaaaagactggtgccggaagagctgaatcatcagccgaaagaagtcattttcgtttaatccaaaaggctttcgagttatcgaaagccttttttctattgttttttgtaaaccgtctattccgctctgttttcgacaaagtattacgcaatattcagaaaaaggttataataggactaatcgggtagattccggaaaaagttttctggctatttcgtctcggtttgttgtttctttgtcaaaatcagggggagggagagttatgcaaaacaaagaaaaaacgcttcaccgcggcttggaagagcggcatatctcgcttatgtcgttgggcgccgcgattggagtcgggctgtttctcgggtctgcttctgccataaagcttgccgggccggggattttagccgcttacgcctgcagcggactgattatgttttttattatgcgggcattgggggaaatggcgattcaaaagcctgtagccggttcattcagccggtatgccagagattatatcggcccgcttgccgggtttttaacaggctggaattattggtttttatgggtcgttacctgcatggcggaaatcaccgcggtcggcatttatatgggctactggttccctgacgtgccgtcatggatctgggcgctttgtgcactcgtcattatgacggctgtcaactttctggcggtcaaagcgtacggtgagcttgaattctggtttgcgctcattaaagtcttggcgattctgtcaatgatcgcgatcggtctggtgatgatcgtattcggtctcggaaacggaggcgttgcgctcggaatcagcaatttatggagccacggcggctttttcccgaatgggattaaaggggtgctgctgtcgcttcagatggtcatgtttgcttatctcgggattgagctgatcggtgtcacagccggtgaggtcaaaaatccggaaaaatcactggcgcgggccatagatactgttttttggcgcattctcattttttacgtcggagctttgtttgtcattatgtcaatttatccgtggcaggaaatcggttcaggcggaagcccgtttgttttgacatttgaaaaaatcggaatacccgctgcagccggaatcattaattttgtcgtattgacggcggctctttcttcctgcaacagcgggatcttcagcacggggcgtatgctgttcaatctggcggagcaaaatgaagcgcctaaagcatacggtacggtcacaaaaggcggtgtgccgggaaaagcggtattggtttcagcgggtgcgttatgcatcggcgttttgctgaactacgtggtgccggcgaaagtgtttacgtgggtgacgagcattgcgacgttcggagcaatttggacatggtcgattattttgctttcccaaatgaaataccgtaaaagcttacagccggaagaacggaaaaaactcaaatataaaatgcctttataccccttttcctcatatatctcgctggcatttctggcttttgtcgttgtgctgatggcttttgatgcagagaccagggtggccgtcatcatcggtcctgtctggttcggcatattattagccgcctattacggcaaaggattccataaaagaaaagacatagatctggaaaacggacagacattcgccgaaaaagcgtaaaaaagagcccgctgaaatgggctcttttttcataggatcgggtaaaagggggaagaataaaacaaattcctgaacattttgcttctgtttcctgacaatcgggagaatgcaaatggtttttacttaaataatattttgaaaaatggtacagtagtaaaacaaagctgatcttttttatttctcttgcattgttttatagtatcggcctttttcaacatattccgttctgattctttccatgtcccgtatgtcttcttctgtcagccggcggataacctttgcgggccggccgaacgcaagacagccgggaggaatggttttgcccggaggaacgagacttccggcgccgataaacgcgccttctccgatttccgccccgtcaagaatgacggagcccataccgattaaagcattctttctgatgattgcgctgtgcagtgtaacctgatggccgatcgtgacgtcatcttcaataagaagcgggcggttcgggctttgatgcagacagctcaagtcttgtatgctgactctttttccgatccttgtcggcgcaacatccccccggatgactgccgagaaccaaatgctcgattgttctccgatcacgacgtcgcccgttatgacggcgttatccgcaatgaacgcttcaggatgtacgtcaggcgtaaattgtttataagggtagattatcatgtctcatccttctttctctaaatttatgtaagaggtgaactgcatgtggacttggaaagcagacaggcccgtcggtaccattgtcattatccacggggcgagcgaataccacgggcgttataaatggctcgttgaaatgtggagatcttccggatataacgtggtgatgggcgatttgcccggtcagggaacgtcgacccgcgcccgagggcatattcgctctttccaagaatacattgatgaagtagatatatggattgataaagcgagaacgcttgaagcgcccgttttccttttgggccacagcatgggcggactgattgcgatagaatggtttaagcagcagagaaatccccgcattacggcactcattttatcatcaccttgtctgggtctgcaaataaaagtcaataaagtccttgattttgcgtctaaaggactgaacgtcctcgctccgtccctcagagtggattccggcttatcacctgatatggcaacgaggaatgcggatatgattgaagcggatcaaaacgattctttatatgtcacgaaggtatccgtaagatggtacagagagcttttaaaaaccattgatgccgctatggtgccgactgatgcgtttttaaaggtgccgcttttgcttatgcagggcggtgatgacaaaatcgtcgataaaatgaaagtccgcaaatggttttccggtgtggcttcccataataaatcgtaccgggaatgggaagggctttatcatgaaatatttaatgaacctgaaagagaaactgtgtttaaggcggcaaaagcctttacagatcagtatatttgaattcgctgggggtgcatatgttgacagtaccggaacatccttttaaccttatggcaaaagtgtatcgggaaatttttccgctcgttcatcaggaattgaacatgtggcgggaaaaatcagattccattaaaaataccgaactgcggcagcaggcggccgcaagtatccgcgataagtcgtttcattgtgaaggaggcggcattttagccctgctttcgggagagcagaaacagaaatgcgtgcaatttatcatcgcgtatcagacaatcagtgattatctggacaatctgtgcgaccgcagcacctcgcttgatccggaggacttccgcatgcttcatctttccatgcgtgacgcgctgacggtcggtgccgaggtgcggccgtactatcagtacagagaggagcgggatgacggcggttatcttcatgaactggtcagaacatgccagcgggtgctcgggtcaatagaacattacggtatcattaaaccttatttgcttgaactgtgtgattattattgcgatcttcaggttcataagcatgtcgttgagcatgaacgggttccgaggcttaaagcctggtttgagcagtacaggtcgcagcttccggaaatggagtggtttgaattctcggcctgcgccggatcgacgttaggcattttctgtctcgttgcttactcattccagcctgattttaacgaacataccgctgagaaaatccgcagcagttattttccgtacatacaaggcctgcatatactgcttgattatttaattgaccaggaagaagatctgcttgaaggcgatctgaatttctgtacgtattatcagtctcatgaagaaatgatgcagagactgcagcattttattgaaaaagcggatgaacatttgcaaggcattccgcatgaaaattttcaccggctgatcaacagggggctgctcggcgtctatttatccgatgacaaagtcgccggccaaaaagaaatgggccgcctcgcgcgaaagctgatcagggcaagcggaaaaacgtcatttttcttttatatcaacggaagagcctaccgcaaatttcagaagatggcttggacgaaaagttcgtaatgggtgaactgcgcctctcgtgtacatcatgacggcgcagttttttatttatgatgtgaagaatgaaacattgtgtgcgcctgcagaatatgatactttaattttatgaaaaaattaaagtatttagcggtcatagcattactttccatttccggaggctgctccgtcacccatgcttccgccggctatcatcctgtcttgatagcgcacaggggctcttctgcgattgagccggaacataccgctttgtcttatgcacgtgcgattaaagacaaagcagattatattgagatagacttacgggagacgaaggacggccgtctgattgcaattcacgataaaacggtagaccggacaacagatggtaaagggatgacagatgatctgtctttggctcagattaagaaactgaatgcgggaaaaggagaaaagattttaacattagaagaaatcatacagaaattcggacaaactgccaattactatattgagacaagagaaagcaacggcagcctggtgatggaaaagaaactgattgacatattacaaaaacataagctgatttccggccataaagcagtcattgagtcttttagcgggaagagcttaaagaaagttcgttctatgaataaaaaagttcctcttgttcgattattaaaagataacgaggctgaggagataaatgataagcagctgcaaaccatcagaacgtatgctgatacagtcgggatcaacgccaaattggcaaatgaagcagtcgtgaagcgcattcatcacaataagatgaaagtgcacgtgttttttgataaggaagacgagcatacgctgacgcctattatgctgaaacaaaaagcagatggtgtctttacgaacaatcccgcttatacacgcagcgtgctgcaaaacagtaaataaaaagagacatgcgcattttacgctgtctctttttttaacggtttcttttttgccgcaaggtgcattgcgaatttgccgatcagcccgatgacaaaaaatgcagcaaaccaccagtaataggttttcgcgaactcaaatcctaaatgtcttgataaaatgatgacaaacatcacatagggaacacttgaaaatatgatgcgaagaatattcaaattgccgctcctcccagatgttacacttaaaagatgaacttttttccattatttcatagtaattgatttttcttgaaaagtaaatacaaaaagaatcggcccgcttatgacaggccgattctttatttgccggcagatttcttttcaatcgctataataaacggcgggtcgttttgctggttgagaaagccgtagctcagcacgcgggctttttcctgatcaagattgctgcagtattccagtaatgcacttttttccgtcttgccttcaggatgcccgtggtacacaacgagaacgatcagcccgttctccttcagcagttcaaggagctgttcgatcgcggaaatggttgagtgaccgtttgtcgtaatgcttttatcgccgcctggcagatagccgagattaaagacggcgcaagccacacgaccgtgcgcatcttcaggcagcgatgcctttatttgatcatggcttttatggtgaagcgtgacgcgcgggccgaagtcggcaccgagccgctccttcgttttagcgagtgcgtccgcttgaatatcaaaggcatggacatgtcctgtctcaccgacaaggccggccagaaaatatgtatcatgtccgttgcccatcgtcgcgtcaaccgtgatatcaccttcctgtgcggcggacttcagcaattctttactgaaagggaggatgtgcatcaaggtcatagggcggtctcctccccggtctttctgaagagctttccttgatagcttccccgtgtttccagctctttttgaatggcgcccagtacttcccacttattgacgctccacatcggcccgaccattaattcgattggcccgtctcccgtaatgcggtgaacgatcatttccgggggaatgatttcgagctgatcacatacaagacttacatattcttcttgagaaaggaactccagctttcctttttcatattgcttcaccatcggtgtgccttttaataagtgaagcaggtgaattttaatgccttgcacatccaaatcagcgacggctttggccgtctccatcatcatgtccctgttttcaagcggaagcccgttaatgatatgggaacaaacgcggatgccgtgttttctcagtttattgacaccctcaacatagcagtcaaaatcatgggcgcggttgatcaggagtgcggtccgttcatgcacggtctgcagcccgagttcaacccacaaataggtccgctcattcagttctgccaaatattccacgacatcgtccggcaggcagtccggacgggtcgcgatagacatgccgacaacgccgtcaagcttgaggacggattcaaatttttcacgcagctcctctaccggggcatgcgtattcgtgaacgcctggaaatatgcgatatatttaccgtctttccacttttcgtgcatacggtttttgatatcgtgaaattgcgtgagtaagtcatcggcccggttgccggcaaaatcgccggagcccgccgcgctgcagaatgtgcagccgccgtgtgcaaccgtgccgtcccgattcgggcagtcaaaaccgccgtcaagcgcgactttaaacactttatgcccgaaatgctcccgcagatgataatttaatgtatggtaccgtttttccgtatttgaataaggaaaagggttattctcgttcaatgttcaaaaagcctccctcacatcagatgcatcctaaaattgtagcatgaatgatggggcggaacaatgaaacaattatggaacggtcaaggcgtaatatctacctggtttttctgttgttgttttaatcgttttggagaaatatcactgaacaatgcaaaaataattcctaaaataagaattacactgcctactttgaatgtattattaaaactgtcacttattttttcattatataaatttgaaatttttttctggatagcgataacttccttcttttgagtattgaaacttttttgtaccttttctttatatggatccggggttatagaaagaatttcttcctcttttttgtttaattcagcaatactttttcttcgatcgaaacctttactgtctgaatgctttaagtgagttattatctcgttttttgcatttttatcaaaaacctgattgttttccacaattgttatggcttctttttttgcagaagctgtgtgatcatttatattcattgtaagcacagatgtaagtatggcaatgcctagcgcttgtccaactgtccgcatcatattaagaatacctgaggcaatacctactttctcaggaggaataagccgtatccctgaactcattgccggtcctatcacaagccctaaagctaagccggtcaaacataacagaataactaccgttgttacagaactgtcgtatcgtatgtatccatataaatatgttgtgattgttaaaccgagcatacctagacccgaaagccaaatgcccccgagtttatcagatagctttccagaaagtacagaggtaaacatagatgatagagctaatgtagaaacaattaaccccgcttctaattcagtttttcccattaaattcgtgaggagtaaagtaataataagggtaccgcttgttaatccaaggccctgcataaagagggtgaaagaactgaaactaaacgtacgtatcttcagcatggataagggaatcatcgggtttttaattttagattcaataaagaaaaacaaacagaataataatacagagattacaaaaagagagataattaatggtgatgaccagcctaaatcagatacttttgcaaagccaaaggttaaacagaagagagctccggataaaataagaatccccatgtaatcaatttttttactcactgtttcatcataactctcagtaataaaaaatgctgctaaaaaaagagaaatcaggcctaaaggaatatttatgaagaagatagcttgccaattaaaattttcagttaataatcctccaagtacaggtcctaaagtagctgctaatcctgagaaagccccccagattccaatgatcaatccttttttattttgaggaacgatggccaaagcaataggcattgtaactggcacaatgaaagcagcagataatccctgaatcactctaattgtgataagcatttcaattgaagtgctcaaacaggcaataactgatgtcaaaataaaaagtgctaatccaaacataaaagctttttttcttccaaaatggtctgccagctttgatgcacctactaataaaactgcaaaagctaaagtataacctgtagccacccaagctacttgagaaaggttgctcgaaaagtaatccagcatcttaggtaatgcaatatttactatagtggtgtccattaccgaaatgaatgtacctaataataatgcagataacataattaattttttgaaattcaaaactacaacctccatcagatattaatctaaattaaaattcgatatatatctaaaaacatgataaatgcaatcttaagaggtgtcaatattattcataaattgttttttcatccacttatctcgaaatcatatttttataattcaacaattttgtaacttgaaataactcaataagagcttaaatggacctgtaaactagctgagatgattaaggatttctgaagagtatgacatgaggagaatacttagcatgaggtgaagcaagtctaataaatctaggactgctcatgataatgctcagtcaggtaagtgctaattagaaatgaatattctttgaaagtttccttttgattgataatattaaaaatgtaaaatgtctggcatgaagatagtacaacgttttcctttgtggaaaaagactttatggggtgtgaaaaagtgcggttaataataaatgacagtgtttcagaattctttgacaagatatcctctattctattcttaaaacacgaggaattcttcaaagattatacaaccaaattgggtttgaatttagataatgaatattttgtattattagatgatcttaaaagaataaaagagttagatagtgagtttttaaatttttattttggcagcttttgcgactacaaagatgttaggaatgcaaatattttttgtttagccacaacattttttaaaataccacaaatttacacgaaagatttttttgaaattattgattatttgtctgcagttacagaagaagagataagaaaaaatattttagagtctctaatttatttacaaggagatcttaaaaccgaaacatctacccaacagtatttaaatgatagggaaagtttatttgagctacttaataatctaaatataaagcccgaatacaagtggatcatatttaaggtaatgaaatctcctaaaacttatgtagatcaattttgcaataaattaatgttggtgaatggttatcttaacgaggcgatttataatttaattaaattcagagatgagtggatgaatcaattaaaaaacataaatatagattttccaaaaaagataatcagtacgttaaaaggtaaggaatacttatcttgtaattatattaatatatatccaacacttttaccttgcactgcaactattacgaaaagtgaagataacatttatgttggactgggttataaagttgataaaatatttgaaaatacattagagaaagcagagattaatcatatcattgattttttgaagcttttatcggataaaagtaagttcaagatattaatcttacttagtcataaaaaaatgtatgctaatgagattgctgaacagctaaatttaaccaacgcaacgatttcacatcatatgagaattttgacattgcaaggtttagttgagagtacgagaaatcaaaataaaacatactattatcttaattcttcaaaattcgattcacttttgaacggtttgttgaaaaaatttaaagctgttccagtcttagatggggatgagtaagttttatagttggtgttagtttcgggatgataattaaagctaataaaaacagatctaaaaaatttgatgaatcccgggtgttttacacaaaaaagataatttaatggtgaacaatttaaagcgaaccgaagatcttgtgggtgatgtggaaaaattatgatgtttttaataaaagaagaattaagttatcgttctaaaatgaaggatttttataaagacttcattctgtcttgattaagttttacatttaatcgtattttatgccatctctgtcttgtgaatgaattacctgatatttcttgtgagaattaatttggaataagaaatactattgatatgacattatcaataggaggactgtttaatggcaacaagacaatcagtagatgaacatctccaaagaagcgaacaggcatatgaatttgcgaatgagcaatttatgaccgcttcaaaacaagagcattataatgataatgagtacagtgaagcgcaaatgatgcttgaaaacgcggtgaatgaattaaacaagctgtcattatctgcgaatgatcagcaaagagagcagctttaccgaatgagattgcagctgcagaccttgcaaaacaacatgattttgcagcgtaattttgattactgaccgcgccgtttcaaatggttcagcaaacctgccggaatcccggcgggtttttttgtatttttttaaaaaaagaattgacaataggcctgagtgtgtttattgtattacgtgtactacttgatgtaatacacataaaacactcgaaaaatgaatcgacatataaatgttaagcatagggaaggggaactttcatgaaaaacaaaagatccgtaaaacaagatgtgcctcttattatcgccgcttcggttttggccagcagtctgtttgtcgttcttgtcgtcatcggttttcaatggcagaacatttaaagaaagagagcagctcgtaaaagaaagaagggaagtaaatgattcaaatcgatccgagaagctcaactccgatttatgagcagatcatacagcaattgaaagagctttgtttaaaagggatcatgaagccgggggataaacttccttctgtcagggaattggcaacgatcattatcgccaatccgaacacagtcagcaaagcgtacaaggagctcgaacgcgatggtgtcattgaaacgctgaggggaagaggaacgtatatatcggagaatgcaaaaacgacattggttgaagggaagatgacgatgataaaagagcaattgaaacagctcatcatcgatgcccattacgcgggagttgagctggagaagctgcaggaatggataaaggaaatcagcgctgatgtgaaaggaggaaaggatcatgattgaattgcggaatctctcaaaaacgatagacggtaaagaagtgctcaaggatatttcgctcaccatcggaaaaggggaaattttcgggctgctcgggcggaacggatcagggaaaacaacactgctccggctcattcagcagattctgcttccggatcaagggacggttttatttaatcaggtggaaataaagcgtcatccgaaagtcaaacagaacattatttatatgcctgttgaaaatcctttttatgacaagtatacatataaacagcttgttgcgattgtaagcagaatctatccgaattttgatgtgacttacgccaatgagctgatgaacaggtacggcattccggaaacgaagaaataccgtgaattatccacaggcctgaaaaaacagcttgcgctcgtccttgcctttgcttcacgcccggctcttatccttttggatgaaccgacggacggaattgacgccgtaacgcgtcatgacgtgctgcagcttatggtggatgaagtagctgaacgggaaacgagcattctgattacctcacaccgtttagaagatattgagcgaatgtgcaaccggatcgggtttttggaaggaaatcagctgacgaatgtgatggacttggatgatatgaaggaagagtacatgaaaatccaaatggcatttgaagaggacgtcgccttgaagatcagagaacaaaatataccgattctcgaccatgccggtgtgttttatacggtgctgattcaaaagaacgatgagaagaaaaagaactttctgcaagagctgcagccgaaagtatggaacgaacttcctgtgaacttagaagaagttttcatcgcgaagtttggaggggaccggagatggtagacaggggattgctgtacagggaatgggtgcagaatcgaactgttcttgtgatggtcggcatttttttagcggcggtcaatccatttgaagtgttaaatacctatctggtttatcaaggctgtctggacacccacgaagcatattgtaagttttatgtgaattctttggatagcggaatgctgaacttaaactgggcgcccgctgtgattttggcggtttgcttattcggactggaacgtacgaaaggaacgattgatgcgcttttcagtctgccttattcccgcgctcaggtgtttcacactaaattttggctcggagcggcggtcattaccggcgctcaggtgatcggctacgggctggctgagctgctcattcttctgttaaagcctgagcgcgtatatttcttccaccattacagcgtcggagagattattgtgagtgttttggcttttacattggtcgcgagcgcaggctgcttaacggggaatacgttcgcccagctgttaacggcgtttgccgtgtcgatagcgccttacctgattattacgttgccgctgacaaatgcggaagttatcttcagggtcggcatgcatgagctgatgccatcagtcaatgcttacctaaacgattcgtttcaatatctgattccgatcatgtatgttaatacggactgggtatctgccagcaagtatatattaatcattccggcagtgatgagcattgtattttatgccatcgggtacttttgctatgtcaggcagccggtggaacggaacggccgtttttttctttggagacagcttgaccggcccattcagattgtggtgatcatcatcgccgttctcggttttggcctggcggggtactcgacgggacatacgatgacagggtatgtggccgggatgctggtcggaggagcgatcggatttttggtcagttattttgtgatttataaaaaaacgaagcatgtgtaagagaggaggaccggaatgataccgcggggattgttgtacacagaatggaaaaaaaatcagtggttgtttttatgcagcggcattcttttaatggcggcaaacccttttatggtttataacaactactcaacatatcaagaatgtttgaataacccagctcttcaagattgtgaattcgttgtcaattatacgaatgggtcgcctctttccttcagctgggttgtgagtgtcatcattgctgtcttcttattaggcttggaacggacaaagggaacgatggatgctttgttaagcatgccttacagcagaggccaaatctttcagacgaaattctggctcggcggggcagtcattgttgctcctcaggcgataggctatggagcggcgtcattgctgatatctttgttgaaaccgagccatacgtacgattttgatcatttttcaatcggaatgattgtcatcagctttatggcttacgccttgttaatggcatccggagcaataacgggacatatattcgcccagctgttaacggcgtttacagtaacggttctgccctttttactcatcggtctgccggccgcgaatttggaggtcgttttcgattttagtgtcggagatcaattttcttttatcagcagttatatcgaatcccgtctttttatatttataacccctattggatatgtgtttaacgactggatcagagaaagagatttgattttaatcattccgattgtgatgagccttgtcttttatctgatcggttacgtcagctttctgaaacatccgaatgaacggaacggcagattctttctttggagaaaattggaccggccggtgcagatcttggtgattgcgtttgccgttatgggtttcggcgttttcggatatggggtcacagacacgatgttcggctatttagccggcattatcttcggcgcggttatcgggtttttcatcagttattttacggtttacagacagtcaaagcatatgtagatccgtttgaaaatgagcagtttggaggaaggcaaggtgccgattagcggtttgctttataaagaatgtaagcagcggcagacgctgctgctgcttacagcggggttcttatctatcttaggccctttggcaattataaatgagtattttcactataaggattgtttacgtgcacttcagctgtacccggggtcagtttgtacattcagcatcgattacagcaattatcggaatttgattgggcttcatttcattccgccggttgttatggggctttttctgataagagcaggccgggctgaaaggatgtttacactgagtcttccgtattcgagaagccggatatttcatacgaagtttttcttgggagcagccgtgttagccggctcgcagtttgtttcttacggagtatccgacatattgttcctagcgcttaaacctgacgctgtccatcattttcaatcattcagcgcagggatgctggtcatcagcttgatgatttacgcattagtgacagctgccggcacgataacgggcaatttagcggcgcagctgatcacagcgttcacggtttccgtctttccgatcgtggttatgacgatttatctgttaaacgccgagttcctttttggcaggcaggctgtgccggatattgatttcccttggagcggatttctgatctatttcatgcctgccgcttacatccatacatcatggatgtattacatgaaacacgcattgttcatctccgcattaatgggattttgtttctatctattcggctatgtgaatttcctgaaaatgccgaatgaacgaagcggacattttatcctgagcaaacacattgaacgcatcattcaagtgctcgtcatgtcgctcagtatgctgggaagtgcgggggtatgcggatatgcttataacggttcgtataccggttacatattcggcatgctcatcggtgcgattatcgggtttttcatcagttattacttcatctataaaaaaacgaaacagatataagggggagtggtgtacgtgatagaggtacagcatatcgatcattcatttaaaatcggcaggaaaggcagagagagtgaggttccggtactgaaggatgtctctttgaccgttgaaaaaggggaaattgcctgtatcgtcgggcggagcggttccggaaaatcaacgcttctgaatttaatttcgggatacatagcgccgacaaagggccgtatcgtcattaacggcactgatgtgacgggtttcaatgaaaaagagtgggcgcagttccgcctcgggcatttcggctttatttttcaaagctttcagctcatcccgagtctgacaacctatgaaaatgttgaaatgccgcttgccttaaaaggtgtcaaaccgtctgaacgcaagcagaaagtcgcggatatgctgaaacgggtcggacttgaaaatcatgcgaatcattatccgaatgagctgtcaggcggccagcagcagcgtgtcagtatcgcaagagccctcattttaaatccgtcaattattttagccgatgagccgacgggaagcctcgattcagaaacggaacttgaggtgcttgcattaattcagcagctgaaccgggagcgcgggattacatttgtcatcattacgcatgacgatgaagtcgcttcgatcgcgcattcaaaattccagctgcatgacggtgtattaaaagggggcgttactgttgagatttaaggatcagattcactttatcagaagaaatatgaagaaaaaccggctgcgtgttttcatgacggtgctggcgacgacaatggcgtgcgcgtttttagtggtgctggcttccgtcggattcggcatccaaaaaacgattacagacattacgatgagccagcagattgttacggaaatcaatgtgctcggccaagagaacggaaaagccgtgaagaaatcagacttggaaaagtataaaaatgtcaagtctgtcgttgagagaacacaagtgtatgaaccgaacaaagcgtcattgggaaaccgaacaaatgaagattcagccattgtgctgacaaacatgaaagatgaagtcaaagccaatatggagcttgatcagggaagagtcgcccgtacagagaatgaaatcgtggtcggctatgattttgcgaagaacctattgacgaaaaaagaggctgacgcttacgacaaagagttaaaggatcaccaaggcgacatgtcggaggtgaaaaaaccaaaaggctatacgaaagacctgcttaataaaacgatacagctgagcatctccaaaacaaacaaagacggagacgttgaaaaaacgaaaacgtacgacttcaaagtagtcggaattacaaaaaaaccgtcccaagattggatggaggatacaaatatttttgtgagtgatcaattcaagaaagacttctcgacattcttggatctgaagaatggaaatgcggaaaaaagcatcaatgtgtatgcggacaaattcgatcatgtcgatcagcttacccatgacctcacggatgacggcttttatgtcagatctgtcacaaccgagctgaagggcgtcaacacctttttcctcgtctttaaaatcggtctgatctttgtcggctttatcgccgtcgtgatttcagccatcggtattttcaatacgatgacgatggcggtgacggaacgaacgcaggaaatcgggattatgaaagcgatcggcgcaagcccgtccatcatccgcagaatgttcctgatggaaagcgcctatatcgggatattaggttctgtcatcgggattatcatttcttacggagtgagttttgccgtcaatctggctgtgccggttattttgaaagcggtagggggaaataccggagctgaagatcttcattataccttctcctacatcccgctcagcctcgttgtgatcgcagttgtcatttgtgcgggggtcgcggtgatttccggtatgaatccggcccgcaaagcgacaaaaaccaacgttctgaccgcattaagaagagaactgtaaaggaaaaaagccggctggacatcagccggtttttcctctatctatcagaaaagggcggataccatgtttcacattttgttaatagaagatgataacactttgtttcacgagatgaaggagagattaacgggctggtcatttgcggtgcacggaataaaggatttcagccgggtcatccgggagtttactgaaattaagcctgatttggtgatcattgatgtacagctgccgaaatttgacggctttcattggtgcagaatgatacgctcccaatcaaacgtgccgattctctttttgtcctcgcgcgatcatcccgcggatatggtcatgtcgatgcagctcggggcagatgattttattcagaagccttttcactttgatgtgttaatcgcgaaaatacaggcggtgttccgccgtgtgcaccaatacggcacagaaccggcgctgatgaaaagatggtgcggggcggtcattgacacagaaaccaacacggtcagctgtaaaaacggttcggtcgaactgaccaaaaacgaaatgctgatcttaaaactgctggctgagcagaaaaataaaatcgtcagccgggaagaactcatcagaagcctatggaatgatgagcgtttcgtcagtgataatacgctgacggtgaatgtcaaccggctgcggaaaaaactcgatcaattaggcatcgggaaaatgattgaaaccaaggtggggcagggatacatcgcaaaggaagaagacggtctttatgattaaatcatttctgctcgaaagaaaaagctggatcgcgatgtttcttttgcagcaggctgtgctcctttttgcggcatatattgatgcgtctattccgtttttttcggtgctgtattttgtttacctgtcgcttcttgtgtttcttgtatttctcttgttccgctatcgtaaagagaccgcctattataaaagcttaagagagtgggacgccaatttagacatgtcttatcttaaagcgcctgacagtccgtttgagtctatcgttgaagaaagcattgaagggcagacagagcaattacgaaaaagctcacttgatcttcaggcggcgtcagagcatgaaaaggatgatctgatgtcatggattcacgaggtcaaaacaccgctgacagcgatgcatctcatgatcgagcgccttgatgaacagccgctgaaagcccctttgctgtatgaatggctgcggattcaccatctcctggaccagcagcttcatcagaaacgattgtcctttattgaaaatgatttatcattccagcgcattcagctcagaccgctcgttttcaaagaaattaaaaacctgcaatcatggtgcatacaaaaagggatcgggtttgacattcagcttgattcaccggacgttcacagtgacggaaaatggctttccttcatcatcaggcagctgttaagcaatgccgtcaaatacagtgaagcggatgacattaccgtaaaaagctatgaacaaaacggccgggtgcatgtcgatatcgaagaccgcggcatcggcatcgagcccaaagatcttccgcgcatttttgaaaaaggatttacctcgacgcgaatgaggcgagatcacgcgtcaacggggatgggcctgtatttggctcgaaaagccgcggctccgcttctcatccagatcagcgtgcgctctgagccggaaagcggcacgatttttaccttggtgtttccaaaacagaacgatgccgtcagcatgttcagcgtgtgacaaaagtgtcacatgcttttctcttttgttcgcttaatcaaacgaaaaaaacggcttctgtttttaaaataaagataaccaatgtaaaaggagaatcataacgtgatgattttagaagcaggcaatatccaaaaaagctacggaaacaagctgaataaacaagaggtgctgaaaggaattgatcttcagattcacaaaggggaattcgtcagcattatgggcccgtcaggatcagggaaaacgacccttttgaatgtgctttcctccattgataaagtgagctcgggcaccattaaactgaacgagacggagattacatccatgaaagaaaaacagcttgccgaattcagaaaacggcatctcggctttatttttcaggattataatttattggacacgctgaccgtgaaggaaaacatactcctgccgttatccattacgaaaatgtctaagaaagaggcggacctgcgatttgccgagacggcagaggagcttgggatctatgatttgagacataagtatccgagtgaaatttccggcggacaaaaacagcggacgtctgccgcaagagctgttattcacgagccgggcattatttttgctgatgagccgaccggagcgctcgattcaaaggctgccacggatttattgaataaactcagccgcctgaatcaaaaacgccgcgccaccattgtgatggtgacgcatgatccggttgccgccagctattccggacgtgtggttttcattaaagacggccgtgtgtatacgcagctgaataaaggcggtcaggacagaccggacttttttcaggatattatgaaaacgcaaagtgtattgggcggggttcaggcatgagtattcatcatttgatcttccagaacctgaaaaagaatatgaaaaactattatctttacgtttttgcgctggtgttcagcgccgccctttatttcgcgtttgtcacgatgcaatacgatccggcgcttgatgaaatgaaaagctccataaaaggagcggcggcaatccgggccgcctctgtactgcttgtggcgatcgtgtcggtatttcttttatatgccaacaccatttttattaaacggcgcggccgggaaatcggcttattccgattaatcgggatgacgaaaatgcacattttccgcatactcagcgcagaaaatttcattttgtatttcggatcgatttggatcggtattttcgccggcttttccctctcgaaattatgtatgatgatgctgtttcatacagtcggtgtgaaagcctctgtctcactgtttttttcaagcaaggcgctcgttcagacgttaattgtgttcggggcaatttacgtgctgattatgatgatgaattacttatttattaaacggcaaagcattttgtctttatttaaaaccgcgtcatcgtcagaaagcggcataagacggctttcttgggtgcagatgttgatcggcgttgtcggtattgcggccattatcgccggctatgccgtgtccgcggatttattcggaggcagttttacgagcatgaatgaactgttttcggccatggtgtttattctcggctcggtcattatcggaacctatctgttttataaaggttcggtcagctttctggcaaatctcatccggaaatcaaaaggcgggtatctgaatgtcagtgaagtgctgtctttgtcatccatcatgttccggatgaagtcaaacgccgtattgctgacgattattacgactctttcggcgctggcaatcggtttgctgtctttaagctatatctcgtactactccgcggaaaaatcggctgagcaaaatacagccgcggactttgcgtttgataaccaaaaggagactgactcttttaccgctttattgaagaaaaacggaattgaacacaaagtaaaaacaatcaagaccattcaagccggtgtcaatatgaagaacattataaacggcgacatgaaaagctttcaacaagacccgtccagcctggcgctgccgattataagcgagaaagacgcagaagggacggagctttctgacggagaagccgtgtttaccggatataatgatatgatgaaaagatttctcgacctgaaaacgtcgggttccattgatataaacggcaaaacggataaaataccgctggcgtataagggcttgaagaacgacttcctcctgtcatatacatttacaagcggagggctgccgaccgttatcgtcacgcagcaggtattcgaccggatcgagaaagatatcgacccgtccatccagggaaaatcaaatcggtttttcggcattacactcaaacgagaagaggacatccaaaaagctgatggtctgtttcaggcgcagcactattcagacggtgcgctttcacaatttgaaacggctgacacgcaaaagaaaaacatggggctgatcatgtttattgtcgggtttttaggattaacctttctgatcacctcaggctgtatcctttattttaaacaaatgggcgagtgtgaggatgagaaggctgattatacgatattgcggaagctcggcttcacaacgggagatctgctgaaaggcatccgccggaagcaggcgtatcatttcggcattccgctcgttctcgggctgttccacagctattttgccgttcagtcaggatggtttttattcggaacggaagtgtggacgccgatgatcatcgtcatggcgctgtatacgctgctgtactccatcttcggcatgctgtcggtgctgtattataaaaaggtcattcaatccgccttgtaaaacaagttgaggagcctccgcataagcggaggctttttttgtatgaatagaagaaagcgatttttaaaagaatagacatacgtcattttttcgcgcgggggagccttatgcagaagtattttcaattgaaatctgaaacaggggcctttcatcttttttccaaggaacacattttcacattgttgatcatcgggttgctgggggcgggcgtgatcgtattccggaaaaagctcaaccagagccgcatgatccgctatgtactattcattctccttgccgtgtcgcagatcagctatcatatatggctgctttgtcatcatgcctggtcgctgaaaacagctctgccgctgcagctgagcgacctttccgtctatttggcgatgctgatggtcatgacaaaaagcaaaaagctattcgccttcctctattttgccggtttgggcagcgccgtacaggcgatggcaacacctgatttaggggcgtattctttcccgcattttcggtacatcgtgtttttcgtctcccacggctgtgtttttcttacctgtctattcatggccgcttcagaaaggtacaggccgtcggcgcgcgggctgtgggtgtcggtgctgatcgtaaatctgtacggggcgtgtgtcttttttattgatcgtgtgctgaatgcaaattatctatatttaatgaaaaaaccgaagaccgcttcgcttctgaatgttttcggaccttggccgtggtatcttctatcaatggaagcggcggtgatattgagcttcttcattctgtatattccgttttggctgctgaggaaaagagcatgaagccgggctgtttttgcgaatccaatcatttgtaattttttcaacattccggcattatttttttcagattctgatgttgaaaaaagacgtccgcggcgatagaatgaatgtgctatgataacgtgatcgatacggagccgcggcttgcggtttccgttttttcatggggttttttatagagagagggggatcggtatgccgcgcgctttgaagatattaatcatcggaatgtttatcaatgtgacgggcgcatcttttttgtggccgctgaatacgatctatattcataatcatttagggaaatcgctgactgttgcggggattgttctgatgctgaattccggggccagtgtggcggggaatttatgcggcggatttttgtttgataaaatcggcggattcaaatccattatgctgggcattatgatcacattggcaagtcttctcggactcgttctgtttcaccaatggcccgtttatatttggctgctcatcattgtcggcttcggttccggtatcgtgtttccggccagttacgccatggcgggagcggtatggaaagaaggcgggcggagagcttttaatgcgatttatgtagctcagaacgcaggtgtcgccgtgggctcggcactcggcgggatggttgcggcgtactcgtttacgtacgtgtttttagccaatgctttgctgtatgtgctgtttttccttatcgtatttttcgggtttcgaaatatcaaaaccggaaatgcgagccaggtttctgttctggactacgagcctgtcagcagcagaacgaaatttacggcgcttctcatattgagcggcgggtatgttctcgggtggattgcctattcgcagtggtccacaaccgttgcgtcacatactcaaagcatcggtatgccgctttcattatacagtgtgctctggaccgtaaacggaatattaattgtcgccggacagcctctcataggagctgttctgaaaaaatggtcaggcgcgttaaaaacgcagatggtcatcggcttttgtatttttatcgtttcgttcggcgtgcttcttagcgccaagcaatttccgatgtacctcaccgcaatggtgattttaaccgtcggagaaatgcttgtctggcctgccgttcctaccattgccaatcagcttgcgcctaaggggaaagaagggttttaccaaggattcgtcaacagtgcggcgacgggcggcagaatgatcgggccgctccttggcggcgtgctggttgatcagtacggcatgagcgtgctgctgttgatcctgatggtgcttcttgttgtcagcatcgcagcgacggtgctgtacgacaaacgcctgaaaaccgttaataaacaaaacatccaagtgcgatgacgacataaaaaatcccgccgaaacagcgggatttttttgtttatacgaccggaagcacgttgacggcgtccttaacgtttaaatacgtctttaatgaagaaaagctggcatcaagctgattcattctcatggcgagggaaggcttgatcccggtgataatcagttctgtgccgattaatttaagcaggtggtgcaatttgaaaatctggtctgccgtctgttcgtttacctcggccaaacctgataagtctataattaagtaatcatctttagatgcggttaatatgtccgtcaaagttgtcacaattgaatcaaatcgttcttccgttaagtttcccactaacggcaaggcggagatgccgtttcggatcggaacaatcggtgttgacagcgtcgtgatttctgtgagggaatcctccaggagcttttcgtattctttctgctctgtaatgtctttttgaaaaccgacaaaatagagcttgtcttcaacatacagaggatcaatgttgagttcattccaaaacggggtgccgtcttttttgacatttttcagccgcaccgtgatcttttctttctggtttaagctctttcttattttcgcgacttgttgacggtcggtttctttgctttgcagaaatctgcagttcttacctaatatctcttcggaagcgtagcctgtcatatccataaatccctgatttgtatatatgatgggattgtcctcaagagaggggtctgtaatcaccacgccgatgcgtgcgtgatcaagcgcctttttgataagctccagctgctccagttttccggatacatttgagtcagccatgtaaaacccccttttggccgtaaagctgcgcgcttttttcagccgttgtttctcccctttttaaatgaatctacagtaaccgtagcataacatatgttctgattcaagcagccgaagtttgcaatttgtcattcgggcttgtcctcatatacactgaatatataaggggaaggcacatcatcgctaagtaagtgactaggtcattgtcactgggtgaaaaatgaatctaatgcatcaagcttaccgatcatgtgttcacatataatggaagaaacaagctttttactttcctgctcaatcgccggtatgtagatatcgaaaatcatcgtattcgtaagggggctggatggcctgaagtcgctttactaaataagggctttaggaaggtgatgaagatgctgcatcaggtaataattgcttgtgtaattggaggcatcatgggggttctcggtcatgtgaaaaagagaggcaggctggagaaacccagaatgacaaagcggtttatctatctcggttttttggaagatggttttatcggaatggctgcttccatcttacttgtcttatccgctgaccccgattcaggaattcaactcgtcatcttatccataatcgcaggctacggcggagaagctgttctcaggagctttgattttgtcagagaacaaaacagtgattcggccgaagcaaaaccacaccagcaaaaaaatcctccatcaaaataatatccccgctcacgacccgttccgggtacattcccattgtatacaaacctgcttgcacttatgaacagaattctataaaatacaggtaagattacggtagcgataagaacagtgaagaggagcagtaagaagcagatttcgcactcagagaattgacggccggtgcaagtcaatcaagtctgtttccgaactcgcctcagagttgcagcggcaaaaccgctgacgcataactgcgttaaaagtatcaagtgagtgcggcttaaaaccgcgctaacgagggtggtaccgcgggaaacaaaaatctctcgtcccttttagggatgagggagttttttttagttttagaataatctgaatataatcttcctcatcccgtcaatacttggactacatacgccgtattcaatcagaaggaggtttttacgttgagttttcagcacgaaaaaatagaaaagaaatggcagaattactggttggatcataaaacgttcgccgtcagtgaagagaatgacaagccgaagttttacgcgcttgacatgtttccgtatccttcaggagccggccttcatgtcggacatccggaaggctatacggcaaccgatatcctttctcgcatgagacgcatgcaagggtacaatgtgcttcatccgatgggatgggacgcgttcgggcttcctgccgagcaatacgcgcttgacacgggaaatgatccggctgagttcacaaaacaaaatatagataatttccgccgccagatccaatcactcggattttcttatgattgggatcgtgaaatcaatacgactgatccggactattacaagtggacgcagtggatcttcaccaagctgtacgaaaaagggctcgcatacgtagacgaagtgccggtcaactggtgcccggcgctcggaacggtgcttgcgaacgaagaagtcattgacggcaaaagcgagcggggcggccatccggttgaacgccgcccgatgagacaatggatgctgaaaatcaccgcttatgcggacaggcttcttgaagatttagaagaacttgactggccggaaagcattaaagacatgcaacgcaactggatcggacgctcagaaggcgcaaacgtgcatttcgcgatcgacggcactgatgacacgtttacggtgtttacgacaagaccggacacgctgttcggcgcggcttatgccgtactggctcctgagcatgagcttgtggaggccatcacgacgcctgaacaaaaagaagcggtagacgcttatgttaaagaagttcaggcgaaaagtgacctggaacggacggatcttgcgaaaacaaaaacgggcgtcttcacaggtgcatatgccgtaaaccctgcaaacggggaaaagctgccgatctggatagcggattatgtcctcgcctcttacggaacgggcgctgtaatggccgtgccggcgcatgacgaacgtgattttgaattcgccaaagtgttcagcctgcctgtcaaagaagtcgtaaaaggcggaaacacggaagaagaagcgtacacgggagacggagaacatgtcaattccggctttctgaacggactgaataaagcggaagcgattgaaaaaatgatcgcctggcttgaagaaacgaaaaacggtgagaagaaagtgacataccgtctgcgtgactggctgttcagccgccagcgctattggggcgagccgattccggtcattcattgggaagacggtacgtcaacagccgttccggcggaagagctgccgctgattctgccgaaaaccgatgagatcaaaccgagcggaacaggtgaatcaccgcttgccaacattaaagagtgggtggaagtcactgatcctgaaacgggtagaaaaggcagaagagaaacgaacacgatgccgcaatgggcgggaagctgctggtatttcctccgctttatcgacccgaaaaatccggatcagctcgcttcacctgagaaactggataaatggctgcccgttgatatttacatcggaggggcggagcatgccgtgcttcaccttctgtacgctcgtttctggcataaattcctctatgatatcggtgtcgtgccgacgaaagaaccgttccaaaagctgtataaccaagggatgattctcggggaaaacaatgaaaaaatgagtaaatcccgcggaaacgtcgtcaatccggatgaaattgtggcgtctcacggagcagatacgcttcgcctgtacgaaatgtttatggggccgcttgacgcatctatcgcctggtctgaatcaggccttgacggagcacgccgcttccttgaccgcgtatggcgtttgtttatcgaggaaaacggcgagctgacgggcaaagtgacagaaggcgcgggcgaaactcttgagcgcgtctatcatgaaacggtcatgaaagtgacagaaaacttcgaagcccttcgttttaacacgggcatttctcagctgatggtgttcattaatgaagcttacaaagcgaatgaactgccgagagaatatatcgaaggttttgtgaagctgctttctcctgttgcgccgcatttggcggaagaactgtgggaaaaactcggccacgaaggttcgattgcatacgaggcttggcctgcttatgacgaatcaaaactggtggacgatgaagtggaaatcgtcgtccagctgaacggaaaagtaaaagcgaaattaatggttccggctgatgctgataaagcagcgttagaacagctcgcacaagctgacgaaaaagtaaaagagcagcttgaaggaaaaacgatccgaaaaattattgccgtaccgggcaagcttgtcaatatcgtggcaaactgaccggacgaagcccctctcctacagagaggggcttttttatcaggcctctatcatagaaattgcaccgcgggctttggtatacttaacaccataaagatgaatgggagtgtcacacattgaaaataaatgaaatcagcacagccgcactggaagaaaaattaaaagcgggagaagagctgtatctgattgatgtcagagaagacgaagaagttgccgaaggaatgattccggaggccgttcatatccgcatgggggacatccctgagaagatggatgcgttagacaaggacaaggaatatgtatttatctgccgttccggaaaaagaagcatgaacgtttgtatgtatttacatgagcagggcttccgtacagttaatgttgaaggcggcatgctggagtgggaaggcgaaacaaagccgaagaaataacgctttgaagtgaaagaagaaaagggacgtgcgtctttttcttctttttttataaaaaaaacgggaggcgaatcaggtgaaaccgatgatccgcgcgatgaaaacaaacgatatcaaacaggtccggcaagtcgcagaacgcagctggcatcatacgtatgaagggattattcccagacacattcaggatcagtttctcgaatccgcctatcaggatgagatgatggaacgccggctcttgcattctttgttctttgtggcggaagaagaggggcgagtgctcggttttgcaaatgccaccccggttcaaaaagacggaaatgcggagctgaccgccatctatattgatccggattgccagggaagcgggataggcacggcacttcttaaagaatgcatcaggcagtccggcggggtaaaaaagctttatgtccatgcagaaaaagagaaccgcatcgccttgtccttttatcaagcgaaagggtttcaaagggtatgtgaatttgaagaagattttaaaggacacaccttacagacggtcaaactggtgctgaacatataaaaacgtccggcccgcccgggaccggatcgcgaatgatcagtgataagccggaagccggtctttgtgcgcttcaaataagtcatcgcacaaagagatgatgtcattcatggaaagctcggcgctcgtatgcggatcaagcatggccgcttgatatacggcttccttttttaatgtaacggccgcttcgatggttaaaagctgtgtgttgatgtttgttctgttgagcgccgcgagctgctccggaagttcgccggaatagcacggcataatttggtttttaacggcggcgcacggcacttcaacgaccgctttcgccggcagattcggtatcagcccggtattcagcacattgccgccgaatgtgaacggacggcccgtctccatcgcttctataattctcgaaccgtattctttcgagcgttcatgcgtcaggttttggttgttgatgatcccgtctctcatcgtttcccagtttttgatttgttccgcgcatctcctcggatattcatcaagcggaatttggagttcatctatcagctccggataccggctttttataaaatacgggtgatattcggcattatgctcagatgattccgtcacgtagcagccgaatttatccatcagctcaaaccgcaccatgtccttatgtttcgtcttttgtttttcgcgtgcccgtcttttaatttccggatataaatcaattccgtcttttttaatctccaaaagccaagccatatggttgatgccggcaatgcgttcttccgtaccttcgtgatccatgccgagtgagtcgaacagatctttggtacagacctggacgctgtggcacaggccgaccgttttgacatttgtatgtctgagcatcgctccggtcagagaggccatcggatttgtatagtttaacagccacgcatccgggcagacctcttccatgtcttttgcgatgtcaaataaaacggggatggtgcgaagggaacggaaaatgccgcctattccgacggtatcggcaatcgtctggcggagaccgtaccgcttcgggatgtcaaagtcaatgaccgtcgcgggtttatagcctccgacctgaatggcgtttatcacatagccggcgtgtgtaagcgcttgttttcggtcatcgtaggagatgatggatatactcggattgtagcggtctctcatgttttccagcatgagctgagattctttcagccgtacagcgtcaatatcataaagcgcgaattcaaatccgtttaatgcttcagtcagtaaacagtcccccagtacattttttgcgaaaatcgtgctccccgctccgataaacgtaattttcttcaacagaaattcctcccttttcttctcagcctttgaccgccccggaggacagccctgagataaaatatttttgaagtgccaaaaacaatacgaccatcggcagcatcgccataattgcggctgcggcgactaagtgaagattgttcgcgttttcgccgaagaaccccgccatggccacggtcaatgtctgcaccttttgatcttgtaaaaagaaaatcgcaaattggtaatcgttccagataaacacgcaggaaataatgcagaccgttgcggtaatcggtttcaacaaaggaaacacgattgtataaaaagtcctgatcaatcccgcgccgtccatcctggcggcttcctcaagttctttcggaatggaagagcggataaaccctgaatataagaaaacggtcagcggcatatatgcagccgtattaatgagaatggctgcggcatgcgtattgaccagccccgcatcagcgaccatcttgtataaaggaaccatggaagtcaaaggcgggataatcatgatggaaatcaaaaggccgaagacgattttgttcagctttgtatttcttctagcgagcgggtatgcggcaagcgaacccatgaaaattagcaaggcggcggaaacggctgtaataatgatcgtgttcagaaaggattgcccgagagaggcacgctcccatgcttcacgaaaattctgaaatgaaaaggcggatggcagcgaccattttgaactgtagtctccttttgcttttaatgacgtggtcagcaaaatataaaaggggacaaaatgaacgcacgagataacggcagccaacagcgtaaaaatccgcattcgggctgttttcatgacatttccgtctcctttcgcttgaaatacacgagagccgaaaagctgatgacaagaataataacggacataaacacgccttgggcggcggcatatcccgcatcctgccgtttaaaatataaatcatacataaacgtcgacatcgattgagaggaattgcccggcccgcctgcggtcagagcgaaaatgacatcaaacagcttcagcccgccgatgatattgatgaccatgttgatggtgacagccggcatcaataatggcagggtgatggtgaaaaacggctgaagacctcccgcgccatccatttttgcagcttcataataatctttcggaatgctttgcagccccgccaaatatacaatcatcgcaatgcctgcgtattgatacgtgttaatcatgacgataatccacgggtttgccgcagggcttgccaaggcgttgacaggaccgattcccagtgcgcccagtacatcattcagcgcacccccgtcatatgagaaaataaaataccaaatgtatcccataatcagcggactgataatgacgggcaggtagacgatcgttcttgtgagcgccttcatttttaagctctgattcaaaagcagcgcatataaaagtccgagcatattctgaaaaaaagtgcttccgatgccgtaaagcaaagtgtttttcacaataagccacgtgtccggatctgtaaaaagccttttatattgagtgacccccacccattgatacgtctgtgagaagccgttccagtttgtgaatgtgataaaagcgcctttgacaaacggaaaaatcatgaaaataaaaaccgtggcaagagcgggaacgtacatccaccacagtgacgcgggttttaccggcttttgatgctgaaatccttgggtttctcttgcaagatcactcattctttgtcagctccttgtgaatcagattgaagacggagccgcttatattccctgccgagtttcgccgaaacttccgcgggggttaagatatcggccgtcagctcctgcccggctgtccccatcacatcccacattccgttcggcaaataaaggcggtcaaaataaggctgcaccttaatatgctgatagcgcttatagtcatttgcgtagaaaatgtccgtttgcacattcactaatccggccggaagcgaggtcgcttcggcaattgatttcgcatgctcgggacgggccataaatgcgatgaactgtttcgcttcttcaagccgcggggaatccttgaatgccgccagcgtgtaacgttcgcctccgatccaaaccggcgcgtctcccttgtggacggccggggtcggtatgatgccgacttttaccttcggattgatttgagcgacgtcttggccgagggtgccgccctgcagcgtaaaggcgattttgttttgcgccatcagttcaatgagctgggaccgttttgccgtcacggcatctatattgagcaggctttccttttgcatctctttcagtttgtcagataaataggtgaagtgtgtccagcggaaggttccgtttaacagctgttttttgtaacggtgtgcgggatctgtgatgagaagcggtgcggcgaattgatcgtaatattgggcaaatgagcttttctcatagccggcaaaccagaagggggtgactgttccgccgcttttttctttaatctgtctcagtgccttcataaaatcatccattgtttccggcggtttgattctgtatttttccaacattgtgcggttgtaggccagtccgtcctttgcctgattcagagggaaggcgtatattctgcctttggcgtctttgagcatgctgtttaaattcggatcgagccgcttcgtccaagacatgccgctgaggtcggcggtatattctccgtagcggattttagcccagccgtgtgtgtcgaaaagatcgggcatgtcaccggctgccattctgaccctcatcatattttcgtagtcattgcctgggaaatgaacgtttacttgaatgtccggatgttctttttggaatgaatcagccaactttctgaatacggcgcgttcgctgtctgaggatattgtggaatagactgtcaatgttttctgcttttctccggcgccgctctgttctgccgagcagccgggtagtatcatgcaagtaaaagaaagaaacaaagccagtaagcgtttcatcttttcctcctttaaatatgatataaacgctgcgggacatgtcacctcctttcttgtgagccgcagctttgtctgacaatcaatgaagtggggagcgtcacggccagcgggacggttctgccgtttaaacggtcgagaagcaatttgacacccgtccggcccatctcttccgtgtatacttttaccgttgataacggcgtgctggcgtattctgcctcatcaattccgttgaagctgacaattgccgtatcgcgcgggacttgaaggccggcttcctgcaaggcttttaaagcgccgacagccatcgaatcacttgcgataaaaaaggcatcggggagacttccgcctttgatggcttcattcatcagccggaacccttcgtgcatgctgtattcgccgatcagtacatgctccggcccggctccggccatttgtaagaaagcggtcagacgcttatcctcaatcgttttattgctgtttacaccgtctatgacggtatgctcccgttcccggccgccgatataaccgagccgctggtaaccgagcgacagaagatgttcgatcgccttttgcgctgcggcataaaaatccacgctgacagaatcgtagcgggcgggatcgggggtgccgttaacaaataccgcgtgcctgaaagcggcgctgatattcgtaagcgcctcgtcttgcaggctgccgattacgatcacgccgtccagatcgtgaaacatatgctcttgaaaagacccgagatggatagaagatgtgataaaaactttttgccgaaagcattcttcctcaatgccttttcggatcgctgaaaaataaggatcctgccgttcttcttccggtgacaggcagctgacaacgccgatcaggggggctgaatcgctgcggctgcggttcttccgtttttttgccgacggctgatagcccagctcatcggcgatcctcagaactttttctcttgtttcatcagtcacggccaaagagtcatccttattcaaaattctcgatactgtcgcgctggatacagatgcctgtaaggcaatatctttgagacggaccatttcgtatctcctttttactaaatatttactaaacagaaatgacctggttattgttaaaatgatattatcatatattagtaagcgttttcaataactatttttggttacttttagtaaaaatcagtaaaaaagaaaatctgtttttctctatcatatttcaattgaaccggaataaattgatagagaaaggagagggtgatgtgctgaagatagctgtttttgatgaggagcatgaaaaggatctgcagactgaagtcaatacatttttaaaggggatttctgatgaacagctcgttgatattaaatatacggtagcggcggcctgtgatcctgaaggtgagcagctttattgtttttccgctctcattttataccgaaaataaaaaagcccggatgaaataccgggcttttttatgcattatgcttttttgacgcggggacttctcggtttttggtatttctccgcttgtttgattccttttctttcgctcgctaatgacttgtacagagacacgatcatcagaaggatcacgactgaaaacggaaccgcggcgagaatggccgtgttttgcagtgcggccagaccgccggaatataataatacagctgccacggcggactggatgacgccccagatgattttcacccggtttgacgggtccaaagagccgtaagacgtttgcattccaagcacaaatgtcgctgaatccgctgatgtaataaagaatacagcaatcagaataagcgttaatacggatgtcaccattgtcagcggatagtggctgagtgcgccgaacagcatcgtatccgttgacattcccgcgacattgaatacgcctttctgctgaagatccatcgcggatacaccgaaaatcgcaaaccataagaaagccaatatacaaggtgtcaccaacaccccgattaaaaattcccggatcgtccggccccttgatacacgggcgataaaaatgccgacaaacggcgaccaggatatccaccaggcccaatagaaaatggtccagctgttaatccattcgcgtttttggggatcattcggagacaagcgaaagctcatctgcacgatattttggatgtattggccgatagaatcggtaaatgagttcataatcagcactgtcgggcctgcaatgagcataaagatcattaaaatacccgcgagcgccatgttggtattgcttaagtatttaatccctttgccgattccgctccacgcagaaatcaaaaataacacggtcacgacagcgatcaggatcagctgaatggaaaatgttttcggaatgccgaataaataatgcagaccgccgttgatctgagtcgctccgagccctaagcttgtcgccacaccgacaacggtcgcaaacaccgcgatacagtcaattgctttgccgatcgggccgtttactttatcgcccaaaagcggtgtcagagtgctgctgatcaaaccgggcgcgtcttttctgaattgaaaataagcgatacataaagcgacgaccgcatagatggcccaagcgtgcagtccccagtggaaaaacgtgtaccggagcgcatcacgaaatgcttggggtgtttctgtttcacctgagggagagctgatggcgtaatggctgatcggttccgcagccccgtaaaataccaaaccgattcccatgcccgcgctgaaaagcatggcaaaccatgataataagccgaattccggtttttccccgggttttccgagttttattgtgccgatcggactcacaatgagaaagagacagaaaccgacaaatatagaaacgaccagcagataataccagccgaaagaatccgtaataaatttttgtgccgtatcagtgacttgctgcaggctgtcaggagaaatggccccccataaaaccgcagctgctgtgatgacaatcacaatccaaaaaacactggagatgttcttcttcaaacgttctcaccctctgactatttttttcaatacgccattttttagtatggtcgcacgattgcagatcattcctttcttcctgttccctcaatcaggtgaaacaaaacgcagaaaactgtatcatgtttttggtcaattatcaacggggacgctcaggtaaatgcgctttaaaccatttacagcgagcgtgagaaacgtcctgcattcaaaccggcgagacgccccgtgacaaaggctgaagtgatattgtagcccccggtataaccgtgaatgtcgagtatttctccgcaaaaatataagccttccatttttttagacgccatttgtttcggctcaatctcttttacggaaacacctccgcctgtgacaaacgctttgtccaaagaaagcgttccgtcagcggcaaccgtaaattgtttgcagtctttgacaaaagccctgaattgatccttcggcagttccgtaaagcttgtctgcggatcaagaccgttccgttccagaagaaaaagcagataccgttcctgcatccacggcttcagtgcgtttttgagcgcttttttcggtgcgtctttcagttccttgtgcatcttttgaaataactcttcctcgttgatgccgggaaacagatcgatgcgtaatttgacatcgggctgctttttcagttctttgacgacaaactggctgcagcggagaatggcggggcctgacaagccgaaatgggtaaacagcatgtccatcacgtgtgtgacaataggtttgccttttttattcaggacgctgacggccgcgtttctaagggacagcccctgaagtgttttttgtttaataaacggttctgacgacgtaaccggcacttccgtcggaaagagttcggtcacggtatgaccggccgcttccgcccatgcatagccgtctccggtgctgccggtatgcgggactgattttccgccgaccgcgataatgacggcgtctgcgttaatgtgttcgtcattgtttgtcgtaatgcccgctgtcctgccgttctcgtaccgcacctctttgattttttcatttgtgcggatggtgacattcagttgttttaatcggttcaaaagcgcatcgacaacgctttgggctttgtccgtcaccgggaacatgcgcccgtggtcttcttctttcagctgaatgccgagtttttcaaaaaaggcgatgatatcttcattattaaattcggaaaacgcgctgtataaaaagcggccgttgccggggatgtgtttaatgatttcttcaacggggaggcggttggtcacgttgcagcgcccgccgccggaaatcgccagcttccgtcccagcttgtttcctttatcgattaataatacgtccgccccttcttcgcctgccgcaatcgcagccattaaaccggacgggccgccgccgatcacaattacgtcataatgtttcatatttcatcaacaactttctttttcacgtataataggcggaaatgtccgcttcctgctattatagcgaaagaaggggattccttaaacgtattttgtttttaagagctttcccaaaaagtttcccgctgtaattattaccgtctaattgcccagttgtgttaaaatagaaaagttgaatcttcgtagaaaatggtgatgaggaaacatgtcaagcaaattgttaaggggcacgttcgtgctgacgctcggcacctatatatcgcggattttagggatgatttatctgatcccgttcggagcgatggtcggagcgacgggcggagctttgtttcaatacggatataatcaatatacactgtttttaaacattgccacgatgggatttcccgccgcggtttcaaaatttgtctcgaaatataactccaaaggagactatgagacgagcaggcggatgctgagagcgggaatgtcggttatgctcgtaaccgggatgatcgctttttcaattctttatatttcggcgccgttttttgcggaaacatctctcggcggcacgagtaacaacggacttacgattgaccacgtcgtttatgtcatccggatggtcagtctggcacttttggtcgtgccgattatgagccttgtgcgcggttttttccaaggtcatcagatgatggggcccacagccgtttcacaggttgtggagcagcttgcccggatcatctttttattgggcgcaacgtatttgattttaagagtgatcaacggcggccttgtcatcgcagtcggatacgcgactttcgcggcgctgatcggatcattcggagggcttgtcgtcctttatatttactggaataagcggaagggcgatcttctggcgatgaagccgaatctcgtcccgtctgcgaacttaagttataaaaaaatgttcattgagcttttcagttatgccgctccttacgtatttgtcggactggcgattcctttgtattcatatatcgatacgaatacgtttaataaagcgatgattgcggcgggccataaggatatcagccaggacatgcttgcgattgtcaccctttatgtgccgaagcttgtgatgatcccggtttctctggcgaccgctttcggtctgacgctgattccgacgattactgaatcgtttacgagcaggaattataagcttttgaatcagcagattaaccagacgatgcaaattattctgtttttggttattcccgccgttgtcgggatgtccgtgttatcgggtccggcctatacgttcttctacggctctgaaagtcttcgcccggatatcggacaggatatattgttctggtacgcgcctgtcgcgattctgttttctctgtttaccgtaaacgccgcgatcctgcaagggattaataagcagaaatttgctgtcgtgagccttttcatcggcgtcattataaaagtggtgctgaacgtgccgctgatcaagctgtttcagggagacggggccatcttggcaacggcgctcggttatatcgcttctcttctgtacggttttatcatgattaagcgccatgcgggctattcgtatacggtacttataaaacgggtcattttaatcgcagtcctgtccgtcgtgatgggagtcgcggtcaagctgactcaatggctgctcagtttctttgtaacataccaaagcggccaggtgcatgcggcgattgtcgtctttgtctgcgccgctgtcggcggtgcggtgtacatgtttgccgcgtaccgaatcggatttttacagaaaatgtttggaaaccgtctgccccgcgttttgaggagaggcaggcattccgcccattgagaaataatgaatagtccgcttatcgcgggcttttctttttaaaggagaggatcaggatgagacttgataagctgcttgccaacagcggattcggctcaagaaaagatgtgaaaaaaatcgtcaaggccggggctgtcatgattgacggagagccggcgaaagatgtgaaaacccatgtcgatccggaaaaacaggacatcacggtatacggagagccggcagactatcgtgaatttatttatgtcatgatgaataagccgcaaggagtgctgtccgctacagaagacagccgccagcaaacggtggttgatctgctgacgcctgaagaacagcgatttgaaccgtttccggcgggacgtcttgataaggatacggaaggctttttgcttctcaccaatgacgggcagctcgctcatcgcctgctttctccgaaaaagcatgtgcctaaaacatatgaggtccggttaacttcacctctggcatcggaagacatcgttcatctggaaagaggcgtcgtcattgaaggaggctataagacgaagccggcagccgttgaaatcattacagaaaacccggatgaaacggtgattcacttgaccattacagaaggcaaatatcatcaggtgaagctgatggcaaaggctgtcggaaatgaagtggcttatttgaagcggctttcgatgggggctgtttctcttgacccggatcttaaaccgggagaattccgcgagctgactgaagaggagctcgaaacgctgagaggcgctgaagtgtaatcgatatcagaaaagcccaaaacagatttgttttgggctttttatatagaggaacaaaaaacaaggcaaagacgctgctttgccttgcagcatgtcaggccgaaaagggccttatgtaattgttcgcttaagatgtaattttcactttttttcgtgttgtctcccacttgcctcggctaggactatgaacaagatcattgtatgctaacacatttaagtctcgctgaatggttctaggtgtaatgccgaattcatcaaccagttcctgtgttgtcacaaggcctttttcctggatgaacatgtaaactgatttaatccgagtcagcatacgatttgttgaaggtttcaaaaaaccactccctatcataagatcggatggacttgatataccacaactttcgactctaaaacttcgtacgaataagcaacaaaggatgacattctgttttttttctcttttaactgcctccattatacacgatatggacgacatgaatctaggaataagcgcagataattttttccaaatgggtgcagccttggtgcattactatgtccggaccgcttttaatattatggaaactgaaactttttttatacatgtccgtatgaaagcgggggagtgagaagtttgggagaattattgaatgcaaacattgtctgcgccggttatgctgacaggccgaaggtgatttccgatgtatctctgtcagtcaacgctggtgaaattgccggtttaatcggagcgaacggcgcggggaaaagtacagtgataaaggcggttctcgggctgtcccgggatattgaaggcggtattgagtggaatgattcatcttatgcttacataccggagcggccgagtttttacgatgaactgacgctttgggagcacctcgagctgaccgggtcattgcggggtatagaaggggaagagtgccgtgagcgggcagggcggctgcttgaagagttttcgctgacgtctgtaaaacatgatttgccttccggtttttcaaaagggatgcagcaaaagatgatgcttatacaggcatttttggcgaagccggatatttacatcattgatgagccttttatcggacttgatccgatctcaacgaagctgtttaccgacatgctgattgctgagaaagaaaggggcgcgggaattttgatgtgcacgcatgttctggatacggcggaaaaaatctgcgaccggttttatttgctggatcagggcgctctgcttcttcaaggcacgttagaggagcttcaggaaaaaacggggagccgttcactgctggattgcttttattcagcggttcggagcagtcagcgatgaccgggcgggctttgttttttcaaaggctgtttcattattggcggtatcaatggaaggtgtttcagacggtcattgattggacggtcgcgctgtacatcgttcttcccgctgccgcatttgccgtttatcaatatgctgaatggctgaacggcagggggcttcttaatggagcggcaggagtattaggatggggctggctgtatgtattcagtgccttgctgttgtgcacgggttttattcatacctttttgctggaagcggatcacgtgtttttggtgcatgcaaaacatctgatgcaaaagctgaaacggtacgcgcttttgtattcgatgttcctttcccttatcaaatggggtgcgcttgccgtattgttatttcccttatggcgccagtacggtgactgtaccttaccggcatattcaggtatgttttgctgtctgttcggcttccataccgcgatattagcggtgcaccggcacagaaaaaacagcaggcggacattcgggaatcaggcggcgggctggctgaaagtgatggttctgacggcgggtgcgttttttatgatcacctttgccgccgaatggtattggctttggccggcgggatgtatattgttcatctgttccgcttttttgacttggaaagggacggagacattatcagcctttgaggaagaagtgcttgaggagaacaggcggaagctttcactcgccgcctcagttttgatgctcagccatgatgtgcagctcccgaatggtaaaaataaagggcggagcaagccgtttttatatcccggctcaaagcacatctttacaaaacggtcggcgtatacggcgtggaaagaattgttttttaaagtgctgatccgaaacggcgggtatctccggcagctttaccttttaaccgcggcttttacggctcttattctcgttcttccgctcttagtgaagccggcagtccttattttatttgcgatcgtcagccgctatgccgcgtcacttttatttgaccggatcacggataaaccggttttaagcggtatcaagagagacagtgatgactatttccgggcgcgaaacagtgcattaaccgtcattcaaatcatctgttccgcctggtgtctcattgccgcgattctttccgttctttatatgtaaaaatccctttccgaaaaggaaagggatttttcttaatgtccgttcaaaataaaaagctgaataaaaaacagcacggcgaagatgaggactagaggatggatttcgcgccattttttcttagctgctttaacaagcggatatgaaatgaagccgagtgcgattccggttgaaatactggacgttaaaggcatcgccaaaatgacgagaaaggccgggaacgcttcgtcaagctcattccagcggatattcgacacagcacccatcatcaggctgccgacaataatcagagccggtgacgtaatcgcggacacttccgataagacgctgacaagcgggctgaaaaacatggaaacggcaaacataacggcaatcgtcagcgccgtcagacctgttcttccgccggcggccacacctgctgaagattcaacgaacgcggtcgtcgggctggtgccgaagatgcttcccaccgtcgtagccgttgaatcagccaacagcgctcttctggcattcggcagctgattgtttttgatcaatcccgcttgttcagcgacaccgatcatggtgccggtcgtgtcaaaaatcgtaacgagaagaaaagaaaacacaacggcgtacagaccgtgatgcacgacatccccgagggcaccgaacggatttgtgattaaaagcccctccggcaggcgcggaaatgaaatgaaccctttcgcaaaatggatctgtccggtcaaaaaggcaatgacggcggtcagcgccattccgatgaacagagcgccgtttacattcagcaccatcagcacgatactgatgataagtccgataagcgttaaaatgacggcgggcgaatgaagatcgccgagtgcgaccagattggatttatcagccgtgatgattccggattggcgtaagccgataaaagcgataaataagccgatgccggtcgtaattccgtattttaaattgtccggaatcgcttctataagttgttttcttaaaggcgttaacgataaaataataaagatgactcccgcgataaaaacggcgctgaaagccgtctgatacgtaatgccgctgcctgtgccgacaacgtgaaaggcgagatacgcgtttaagcccatgccgggggcaatggcgatcggaaaattcgcagcgagagccatccataaagttccgacaatggaagcgataatcgtcgcggtgaacacctggtcaaacggaattcccgcattggaaaggatcaccggattgacgacaatgatatacaccattgtgaaaaaggtggtcaatcccgcggtaatttctctttttattgtcgtttgatgcttgtcgagatgaaacataagtacctccaatgacgaacattttttcaaaacatcatctatattattcgttttatcgacattttgcaagtctttatcaagaaaggggatttgtgatgaactgggaagttgaagtcatcagaaacaaagaagatctgatccgtgacacgcagaagtttttgcagatcaacagcgtaatggacgaatcaacagccggtcccggccggccgtttggagaaggcgtcaatgccagcctggcgtcactgctggaattcggtaaaaaagaaggcttcaccgtaaagaatcttgacggctatgcgggccatattgaatggggaacgggtgacgaaatcgtcggtgttttgtgccacgtcgatgtcgttccgcccggagacggctggacgagcgatccgttttcagccgatatcagggacggccggatatatgccagaggcgccattgatgataaagggccgacaatggcggcgttttatgcgctgaaaatcgtcaaagacatgcagcttcctttatccaaacgcgtgagaatcatcatcggaacggatgaagaaagtgattggagatgcgtggatcactacttcaaacacgaaaaaatgcctgacatcggctttgctcctgacgcagattttccgatcattaacgcggaaaaaggaattatagatgcgtcactgcgcattgtaaaaaacgcttctgacaaagacgcaaaaaacgtgcttctgtcattccgttcaggactgcgcttgaacatggtgccggatgcggctgaagcggttattgaagggaacggtattgatgccgtgcacgcatatttcagcaaatggcttgagcagtcaaaaacacaaggtgaagcagtttcggaaaatggaaaactgacgcttcgggtatacgggaaatcatgccacgcgatggaaccggataatggtatcaatgccggcttaaagcttgctgaatgccttaacggaacagagctggatggagccggaaagcactttgtcaaaaccgtcagtgactattttttaaatgatacacgaggcaaaaagctgaaaattgattgcagggatgacatcagcggagagcttacattgaatgtcggcacctttacatacagaaagggtgaggatggagaactcggcatcaacatccgttatcccgtcacttcagacagcaaagtcatccgtgatgcttttacgtctgctgaagaattccggcttgaagaatttaaagacagcaaaccgcaccacgtttctgccgatcatccgctcgtaaagacgcttcaaaaggtttacgaaggacagacgggaaagaaagcggatctgatttcaatcggcggaggaacgtatgcgagatccctttcggcgggcgtcgcgttcggtccgctgttccccggccggcctgacagcgcgcatcaaaaggatgagtacattgaaatcgatgaccttctcaggtcaacggctttatatgccgaagccatttatgaacttgccaagtgataataaaaagggacgccgaaagcggcatccctttttatcattcaaatgaccataaatccgtggataaataacgttctcccgtatcggccgtcatacagatgacgatctgttcgggagggaggcgtttggcggtttcaatggcggcgaagcaggcggcgcctgaagacgggccgacgagtatgccttcttcccgggccagacgacgtgttgtcgtatacgcatcttcatcagatattttcatgatttcatcgtaaacgtcctgattcagtatgccgggaataaatccggggcttgtcccgacaagcttatgagcgccgggttttccgccagacaggacgggagatcccgcaggctcggcgacatgaacaatcatatccgggaaaagctctttcagcgtttctccggttccggtaatggtcccgcccgttcccgccgttgccacaaaagcaccgagcggtctgttgagctgctgaacggcctgatagatttcaatggcggtcgtttttcggtgggcatctggatttgcgccgttatcgaattgcatcgggataaaacttcccggaatctgttcggcgagttctttcgcttttttgatgctgccgggcattctttccgcccccggtgttaacacaacctccgcgccgtacgctttcaggaggttgatgcgttctttcgtcatcgtgtcaggcatgacgaggattgccttgtagccgcgcgccgccgcgttcatcgccaggccgatgcctgtgttgccgcttgtcggttcgatgatgacagagccgggttttaaatgcccgctgttttccgcttcaatgatcatattgtaagccgctctgtctttgacactgccgctcgggttaaacgattctaattttaaatagacctgtgctgcatgttctggctgaaggcgattgagctttacgatcggtgtgccgccgatcagctccgccgtgctgtttacgattttcaaggccggctcattcctttctgtataaaacgttcggtacataatatcctatcataatgagcggacagggttctcctctccgcttatccgttttataataacaccataaccaaagagggggagatcctcgtatgaaagcttcattgccgcattattttatcggcattccgattccggctgacattgctgaaccgatttgggaagcagccaaaaaggagccggcgttatcattcaaaaaatgggtgcacccgcatgactatcatattacgctcatttttctcggagccgcggatgaagaacggcttgcgaaattatcgtctctgctcgcagatgctgcgtcggcagcgcagccgtttaccgtacagtttcagcatctggatattttcggcgaccgcagacagccgagagtgcttcaccttgagcccgaacggaatgaactgctctttgatttgcgggaaaaaacaaaacaggctgttttgaaagccggttttcaagtggaaaaacggccgtatcaccctcatatgacgatggcgcggaagtgggcgggagaccggccgttttctgacgatgtgccgtttgaaagcggcagggtgcaaagtgccgtcagcaggttttccctgtttcagacccatcttgaccggtcgcctaaatacgaagaaatcgcacagtttcaattgacataaacaaatattcggagtggagaaatcacatggcacagatcatcaaaattcacgactgcatatccagatatgaacttgatccataccattatatgaaccagtttatccggctgaagaaagaacgctgggaggcgcttcttgaagcgtttgaccggataacggaagaaacggaaacggctgccggcggggaaaccgatcaagcgccggccaggaaaaaattttccttaaaaaagagaaaagaagaaaatacggccgatataaatgaaaagaggcaccaatggtttgatgaaccggagggagaagaggcgctgttcgggaatcttccgtctcaaaagtctgagctcgcgccttttttcaaagatcagctgtatgactttcaattaaaatgggcgagctccacgctttctcaaaagtctgagctttcgcaggcggtcaaaagggacaggatgttaaaaatgctggctcaaaaactgcccgattcctattttgtgatgtatcatccggttctgcaaattcagcaggcgtccgtcgaactgagcattatcatcatctcgccgctggagattttctgcgccgcttttatggaagcggaagaggacagtgtatatatcggatcaaaacaccgtttttgggaagaaagaggctccggcagcacgcgccaagtattgaatccgtctctcagcctgcaccggacgggctcggtcgtttcgcaaatcgtaaaagaaaagcaggccgacattcccgtgcggaagcttttgctcagcagaacgtcttatattgattacccggagccgccgtacgggctggaaatagctgataaacggactgcggcagggtggctggaaaagcagcagaaaaatacggcgccgatcaagcaccaccagctgaaggcggcgaaggctcttttgtcttacggcttgagcgattcaagccggagacaggaatggcttgattaaagcggacgtttgccggctgtctcttcatctatgaagcaggtgaaaacaaacgatgagtcaatggttttttattattaatccggtctcaggaggcgggcggggccggcgtgtctggaaatcagttcaaaaagagctgaccaggcgcggggtcagccaccgctcttttttgaccgggcatcccggacatgcggaggtgctggcaagacagatttcaatgatgcaggatcataagcttaagcggctgttcgtcatcggcggtgacgggacgatgcatgaagtcattaacggactgaaaggaacggatcagattgagctgacctttgtgcccgccggttcgtacaatgacttttccaaagggctcggtattaagaagtcggcgctcctccaagaaatcaaaagtctgcaccgcccgctcacacggaaattttttgcgggaaacatcaacttttttcatgacaaagcgcaatcactctattttattaaccacctgtctgtcggcttcgatgcctcagttttgaaggcagccgcgaattttccgttttcgcgcgttcttcggtttttgcgtctcggctttgtgatttacccgctcgcgcatttacatacggcctcggggtttcagccgttcagatttgtttgcacggcagacggccagagacgtgaattccgcaatgtctggtttgttattgcggctaatcacccttattacggaggcggcatgaaagcggcgccttcagcaaatccccgtcaaaactattttgatattgtcattgcagaaaacctgtcctttttttcgctgtatcgttttttatgggcgatgagcttcggccggcatatcaaaatggacggagtgacgatgataaaggggaaggaattcgtttttgaaacagatgggaaaattccgtttcacgctgacggcgagctgatcggaacgacgccgtttcggcttatgccgggcggtgcgccattgaaaataaaaacataataaacaaatgaaacccgtcaattgtttcacggcaacagagcggttcgcggcataaatcttcagaattcacaggtgttcttgctagttttgcttgacgaagtttgtgctgtagcgctaaaatttataggacggctattgattagcatatgagactctcaatagctgtcttttttattctcatgaaattgtttatgacaggccgctccgccaatagagaaaggctggaggcctattctaaaatattttaagaaatgatgggttgaacattgatatgaactggttgggacaattactaggtagcgattgggagatcttccccgccggaggagctacaggagatgcatattatgcgaaacataacggccaacagctttttttaaaacgtaatagctcgccctttttagccgtgttatccgccgaaggcattgttccgaagctggtttggacaaaacggatggaaaacggagacgtcattacggctcagcattggatggcgggcagggagctgaaggcaaaggatatgagcggacgcccggtggctgagctgctccgcaaaatccacacatcaaaagctttgctcgacatgctgaaaagattgggaaaagaaccgcttgatccgggcgcccttttgtcgcagctgaagcaggccgtctttgccgtgcggcaattttcgccgcttattcaggaaggccttgcttatttggaagctcatgtggatcaggtgcaattcggtgaaaaagtcgtttgccattgtgatgtgaatcataataactggcttctgtctgaagacaaccagctgtatttaatagattgggacggcgccatgatagccgatccggccatggatctcggccctttattgtatcattacgtcgaagagccagcgtgggacagctggcttgggatgtacggcatgaagctcacggaagggcttcggctgcggatggcgtggtacatgttatcggagaccatcaccttcatcgcctggcacaaatcaaaaggaaacgacaaagcgtatcatgatgccatggaagagcttcatgccctgatgaagcggattgtcaagtagtcaggagtacgaatccatctgctccacccattgggacaaatggttttggtgctcctgaatatgcgtgtcgatggaatcggccgtgatgccggactggctgtagcggtagacatcctcgagcacgttttttatatttgaatcaagcccggtgttggccatcagtgatttgatgacgcgctccagctgttcatactcggcaaccgtgccgcagcaatccaattgatggtcggccaatatgtcctttaataaccggacctgatgttcgcttgttaagcccatgattcatatacacatcctttctgtgtcatacattgtgcaaagcggtgcggttttatgcatcacatgagtgttccggaccggggagcctctttttttatgcggccggcgcctttaaaaggcgcttgcggctctttatgtttcatggtatgttgttactcgaaattatagatagaggtgtcaatcatatgagaatgcgccataaaccttgggcgaatgattttctggcagaaaacgctgacatcgccatcagtgatccggcccagtataaagggcggtggaatacggtctttggcaatgacaacccgatccatattgaagtcggtacgggaaaagggcagttcatttcaggaatggccaagcagaatccggatatcaactatatcggaattgagctgtttaaaagcgtcatcgtcactgccgtccaaaaagtaaaggacagcggggctcataatgtccgtttgttaaatatagacgcggaaacactgaatgacgtatttgaacggggagaaatcaagcgcgtttatttaaacttttctgacccgtggccgaaaaaccgtcacgaaaagcgccgtttaacatttaaaacgttcttgaaaaaatacgaagaagtgatgggcgaaacaggtgagattcatttcaaaaccgataaccgcggtttattcgaatactctctgaaaagcttttccgaatacggcctgcttctgacagaagtcagcctagatctgcacaacagcgatccgaagggcaatattatgacagaatacgaagaaaaattctccgcactcggccagccgatttaccgggccgaagttgaatggagaacaaaagacagactctgatgcgggagtctgtttttttatgccgccatttgctaccattatatcaggagggatcaagatggagacattgaatattgggaatatttcattaacatggctggacggcggtgtaacacatatggacggcggagcgatgttcggcgttgtcccgaagcctttatggtcgagaaaataccccgtaaatgacaaaaaccagattgaattaagaacagacccgattctgatcagaacaaacggcctgaatatattggttgacgcgggtatcggcagagggaaattttctgataaacaaaaaaggaattacggtgtaacacaggaatccaatttaaaacactctcttcgtgaactcgggctttcctgtgaggacattcatattgcggcgatgacccatcttcattttgaccatgcatgcggcttgacggaatacagcggagaggagcttgtctctgttttcccgaatgcccgcattatcacttctgcaacagagtggcgcgaaatgagaaaccctaatatcagatcgaaaaatacatattggagagaaaattgggaggcggtacaagatcaggtcgaaacctttgagaacgagtatcagctgacagaaggcattacgatgcaccacaccggaggccacagcgacggccacagtgtcatcgtcttagaagacggcggggagacggctgtgcattttgccgacctgatgccgacgaatgcgcataaaaatccgttatgggtgctggcctatgatgattatccgatgacctccattccgcaaaagcagaaatggcagacgttcgcggcagaaaaaggcgcctggctgattttctatcacgacgcgatttacagagcggtaaaatggggagaagacggcgaagtggctgcatctgtcaaacgggagagaaaataagcggatcgatgatttacctgtatgaatttcgggaataaaagcaaacctaagacaaattgctttgaaaggaagagacaggtgaatcaatttcaagtgacgaaagatggagaaatcaaaacaactctgcgcggattagaagtgctttctacgccttttttaaataaaggggtggcctttacacaggaggaaagaaaggaactcgggctcgagggatttctgccgccgaaagtattgacaatcgaagagcaggcgaggcgggcctacgaacaattcagttcgcagcctgatgagctgagcaaaaatgtgtacttgaccgctctccatgatcggaatgaaacattattttacaggctgttaaatgatcatttaggcgaaatgctgccgatcgtatatacgccgaccgtcggcaccgcgatccagcgttacagccacgagtacagaaaaccccgcggtctgtatttgtcaatagatgaccctgaaggaatgcgcgccgcatttcagcagttcggaaaaaatgaaaacattgacttgatcgttgcgacagatgcggagggcattctgggaatcggtgactggggcgtcggcggcatcgccatttctgtcggaaaactcgcggtgtatacggcggccgccggaattgatccgtcacgagtgcttgcggtcgttttggacgcggggacaaatcaagaaagcctcttaaatgacccgctgtatgtcggaaaccaacattcaagagtgcgcggcgagaaatatgaccgctttattgatgagtatgtctcgcttgcccgggaaacattcccgaatgcgctgcttcattgggaggatttcggcacggctaacgcccgcggcatattaaaacggtataaagataaagtctgtacgtttaacgatgacattcaaggaacaggcgcggtgtcgcttgcagctgttttagcgtgtgcgaaagcatcaaaagtgcctttaaaagagcataaagtcgtcgtcttcggcgcgggaacggccggtatcggaattgctgagcagctgcgcgaagctatggtgcataacggattaagcgaagaagaatcatacagccgcttttggtgtatcgacagaaacggattgttgacggatgatatgaaggacttgcgtgattttcaggttccgtacgcccgccctgctgatgaagtgaaagagtacggccgcagcggtgaaggcggatcaattgatctggcggagacggtgcgacaggccaagccgacgatcctgatcggcacatctaccgtttcaggcgcatttacggaagaaatcgtcaaagaaatggcctcacatgtcaaacggccggctattttgcctatgtcaaacccgacgacattatcagaagcaaaacctgaagatttaattaaatggacggaaggccgcgcgcttgtcacaacgggaagtccgttcccgcctgttgcgtataacggcgttacctaccatatcggacaggcgaacaacgcgctcgtattcccgggactcgggctcggaacgattgtgacaaaagcaaggctcattacggacaatatgttcgttgcctgcgcgaatgccatcgccggtatggtggacgtcggcaagccgggcgcgccgatgcttccgaaagtggaggatctcaggacggtatcggcaaccgtggcggtagctgtagctaaagctgcgattcaggacggtgtagcggaaacggaacccgaggatctgatccaagcggttcaggacgcgatgtggaaccccgtatataaacgaattcggccgatgtaaccgaataaagcccaaaacgctgatggttttgggctttattttttgcttgtccgaattatgaggcgacagaatcaatgacatcgacaatctggcctgtttttgcattgaccataacttcatattgctccagttcgccgaatgccgaacgtgtcacgccggttttgtatacctggatggtttctccgtttacctggtagggctccggctctgtgtaaatccatgatccgtctatcggcccgcgctgtttaaaagccgctttcacgatacggagcgctttttctgaagagatataaggtttcatcgcatactttttcactgcgatggcagcgcataatccgactcctgcacctaagagaaaatgacgtaatttcaatatgaagcacctccaattatgtcgtagtttttattatacagaagatgccagacggtgttaagtaaagcggcggttttacagcccattcaatctgagcgcttggaaaacggttgtttttctaataaaataaaagcattacatagaaatgaggggaaaatatgaatgaggaaacgaaaacgcttttccggacgctgacgcagcttcccggcgcaccgggaaatgaacatcaggtccgctcttttatgaaacgggagcttgcgaaatatgcggatgacatcgtgcaggacagactcggaagtgttttcggagtaaggcgcggcgctgaagatgcgccgaccgttatggtagccgggcatatggatgaagtcgggtttatggtgacacagattacggataacggcatgctgagatttcagacgctcggcggctggtggagccaggtgctgcttgcccagcgtgtcgaggtgcagacggataacggaccgattatcggcgtcatctcaagcatcccgccccacattttaacggatgcccagcgcgcaaagccgatggagatcaaaaatatgatgattgatatcggtgccgatgacagagaggacgcggtcaaaatggggatcagaccgggacagcaggtcgtgccggtctgcccgttcaccccgatggccaacgagaagaaaatattgtccaaagcgtgggataaccgctacggctgcgggttaagcattgaactattaaaagagctgcacggaaaagacctgccgaacaatctgtacgccggggccaccgttcaggaggaagtcggcttgagaggggcgcagacagcggccaacatgattcagcctgatctcttcttcgcgcttgatgccagcccggcaaatgatatgagcggcgataaggagctgttcggccgtctcggcgagggggtgctgctccgcattctcgacagaacgacggtcatgcaccgcgggatgagagagttcgtccttgatatggcggaaacgcacaatatcccttatcaatatttcgcttcaggcggaggaacggatgccggacgcgtccacatatcaaacagcggggttccgtctgccgtcatcggcatttgttcaagatacattcatacaaatgccgctatcatccatgtcgatgattatgccgcggcgaaagaaatgctcattaagctggtcatggcgagtgacaaacagacggtcgaaacgatcagagaaaatgtgtaaaaaaaataagcagtcaataagtccctttgaatacttattgactgctgtttttacattctgttttaagccgcatgatcgagacagttctttgttgtgaatataagtgtaaagcgtattgtaaatagaattaggtaacacatattatttttcaatattattatcaaaatggttccgatccagataaacaaccttcgaacctttattgcaatgataaacgtttttaaatcaaaaacatgctgcaagcattgagaggagcagcgatttcacaaagtcgagtcatttgcatttttatttgttctgcaagaaggtatgattatgacaaaaaagacaaatataaactttcctcttgaactgattaatactgaagtggtgagtgtaggtaagcaggaccgcataaaagcggcctgcttattctgtttcaaataaataagagagtgctttcatcgcttgattgacggtttcgaccgtgatattcgcttttccggaaagctctttcagcggatgatgaagttctttcggacggatgagaatgagcggctttccttttgcgatggcataagaagcatccatcgcggtattccactgtttatatttctcgccaaacagggcgatcacaaaatcggctttttccatcagcacctctgtacggaaattgttgatatcagaagctctggcgtcttttaaaacagaatcgggctgcacgcccataatctcttctccgatattgtctgagcgttcatggttttccatcggaccgacaaacgtaatcggcaggttcagcgcttttgctttttgtttgatttcatcccgccaatcactgtggatttcacccgctaaatacacgacaaactgcatcttttgcccctccttatgtacatattcagattttcgtacggctacaagcaaaatggtaaacgaaacttgcttgataatgcaaatgaaatatgataatgatattgcatatagttggtcttgccgtaaacagtctggtatgatccaattggacaaacatcagcatataaaaaactcataatccagatggaggaatgacaatgaaaaagattgaaagcacggaagaattgcaaaaagcggtacaagacgattgggcggtatttatgttttcagcggattggtgcccggactgccgctttgtggagccgtttctccctgagctggaagcggactttcctgaattcacttattactacgtagaccgcgatcaatttattgatacatgcgcggaatgggaaatttacggcattccgagctttgttgtgtttaacggaggaaaagaagtgaaccgcttcgtcagcaaagaccgtaaaacaaaagaagaaattgagcaatttttaaccgattcccttgctaaagcataaaggaggccacgggctttgaaaatgacgtcaaggaagctggcggatttattaaaacagcgcctgcagcacgagaaccgatccttcttttttgacagagaaaaagacaccctccgtgttgaggatcaaacgaccaaaaaaggcatcacattggagctcccgccgatcattgcgaagtgggagacgaaaaaagaagaagcgatcgacgaaatcgtctactatgtgtcagaagcgatggaggcgatggaaggaagcggacaggagatgtccggaaaggaagccggaatctatccggtcatccgctccacgtcatttcccgatcaaacgagcgacggcattccgctcgtgtatgatgaccatacggccgaaacgagaatctactacgcgcttgacctcggcaagacgtaccgcctaattgacagccgtatgctcgagaaagaaaactggacaaaagaacggatcagggagacggcgtcattcaatctccgctctcttccttcggtcgtgaaacaggatacggttgcggataattatttttattttttcagggcgaatgacggctatgacgccagccggattctcaatgattcgattcttcatgaatataagcaggccgctgaaggcgaattggcgatttccgtcccgcatcaggatgtattaatacttgctgacattcgaaatgaatcgggttatgatattttagggcaaatgtccatgagcttctttgcaagcggcacggtgccgattacggccctttcatttctgtataatgaaggcagactggaacctgtgtttatcatggcgaaaagccggccgaaaaaggattagaaaggatttttcttatgaacgctttttacaataaagaaggtgtgggagatacgcttctgatctctcttaaagatgcagcacgcgaagaaatcggctatgaaagagaaggcgatgtcgtcagaatctttaacaaagaaacaaaagaaacgacgggctttaacatttttaacgtgtcttcttacttacagattgaagacaacggccccgtcgctttgtctgagactttcgtacaggatgtgaatgaaatactgaacagaaacggcgtttcagaaacgctgacggttgacctttctccgaaatttgttgtcggtcacgttgaatcgaaagaaaaacatccgaatgcggataaactgaatatctgccaagtgaatgtcggagaggaaacccttcaaatcgtttgcggcgcgccgaacgtggacaaagggcaaaaagtcgtcgtcgctaaagtcggtgcggtaatgccgagcggacttgtgattaaagacgctgaattaagaggcgttccgtcaagcggcatgatctgctccgcgaaagaactcgctttgccggatgcgccggcggaaaaagggattcttgttcttgaagacagccgcgaggccggcgaagcatttcaattctaactcccataaataagcgcacagaatcgaatgatgtgagagaaagccgttaagcaggcctgcttaacggctttcttcagttgggagcttaatcttttctgagccgcccggcaatggtatactaaatatcgtcccagactactaaaaagggagttagagagtgattaaacatgagttggctgaataaattttttgacttatttttaggtgaaaaagaagaagagcatgaacgtgaaccgaacacgcatgcccaaatccagaaacagcaaataccggatcagccagaaggcaaattaacgcgcatggaagattctaaaatatattacgaatatccgaaagggaatttccgcttcccggtcgttccggacggctataagcgaacggagcaaaaccaaagacagcgggaaaggcacgaacgccgccagccgtcccggggttatgccgccgggaaggagcaaacggagcggaaacagcatacacataaagagcctgatacggtgaaaaagccctttaaaccgtcatccattccttcaccggtttacggctttcaatctcagcacagcatcaaaaaagcgcctatttccgaaaagcggcgtgaagagaacgtaacattgctgtcagaggagcaatttgttccgccaaaatccggtcaggaaacggaaaaagagcccgtcttcacaacatccggtataacaaaacagacgaatgaccggccagaaccgtttgcgaaacaagaaacggaagaaattccggccgttaaaaaagaggagcttcacacggaggctgagaatgcaaaagagcaagtgtttgcagcaccagaaccgcagcaggctgaagagctggagcacaccgaaagcgcggagtctgccggctttacagaagaacaagagcatgaacaaacccgcccgcagcctataagagagcctgagtctgaagcatcccgaacggctgaaaacacagaggaacaagcggcgccggagggggaacatcaggagcctgagccggaaaaagcaccgccttttgaaaccgcagaagaaccggtgtatacatacacagaacccggatacgaggaaattcagccgcagtctgaagacaagcccgaatcagctgaacccgacgcgaaacaggaagcagactctcagcctgagtacaatgaagcagagcggcattcagaccccgagcctgaacctgtaagcattgagacgaccgatgccccatcccggcctgccgaagaaaaaacggagcatcacggacagcctcagactgtgagaaaagcggagcagccgaaagagcgcaatgttccgtttaacgtcatgatgcttaaaagcgataaacacaagcagacgaagacgccagagggcggagcgagctatgtctttccgaatctgtcgcttctggacgtaccgccggcgcaaagacatgacgaccaatcgtggattgaagaacagcgcgagcttttaaacgttacactgaaaaactttaatgtgcgcgcccaagtcgttcatgtcacacaaggcccgtccgtcacacgttttgaagtgcatcctgagcccggagtgaaagtaaacaaaattacaaacttagcagatgatattaaactgagcctgtctgccaaggatattcggattgaggcgccgatccccggtaaaaacacgatcggcattgaagttccgaaccgcgtaagcaaagtcgtcgatttaaggcagatgatcagaagcgccgctttcaggacgaatccgtctccgcttacagccgcgctcggtgtcgatatttccggaaacccggtcgtcattgatttgaaaaagatgccgcacgggttgatagcgggtgcgacaggatcgggaaaaagcgtctgcatcaataccattttggtcagtctgctttataaggcggatccgagtgatgtcaaaatgcttctgattgatccgaaaatggtcgagcttgcgccttataaccaaattccgcatttggtcagccccgtcatcacggacgccaaagccgcgaccgccgcgttaaaatgggttgtggaagagatggaacggcggtatgaactgtttgcccattcgggtgtgagagatatcggacgctttaatgaattaacggccgatcataagacaggcgaaaagctcccttacctcgtagtggtcattgatgagcttgccgatttaatgatggtcgcgccgaacgatgtggaagaaagcatcgccagaatcgcgcagaaagcgagagcctgcggcattcatctgcttgtcgcgacacagcgtccgtctgtcgatgtcattaccggaatgatcaaggcgaacataccgacgaggattgcattctccgtctcaagccaggtagattccagaacgatcatcgacatggcgggagcggaaaagctgctcggaaaaggcgacatgctgtactgggaaaacggtaccggaaaaccggtgcgcctgcagggcaactttgtatccgacagagagattgaccgcgtcgtctctcatgtcagaaagcagctgccgccttcttatttgtttgaacaggaagaactgatcaggcagggaaccgcccttaaggaagaagacgaactgtttcctgaggcgtgccaattcgtcgtggagcaaaacagcgccagcacctcaagccttcaaagaaggttcagaatcggttataaccgcgccgcgaggctgattgacatgatggaagccgaaggcatgatctcagaagcgaagggcagcaaaccgcgtgaagtgctgattacggccgctgacatttctcaagaataagaatatcgttcatttttctcacaaacatggtatgatagtggatggaccatcaaaactgcatcactgtcacgcgctgaaatatcatgcggcaggtttaatcaaaaagaaagttacagatactgacgataacgtaaaaataaatggaagcgccgctgtgcgggcttttcgcccgctgcggtcgcaaaatgaaatgagcgtcatatactggggaacagatagacgtttgttggaggtacgattatgactgtttatcattttgttggaataaaagggacaggtatgagcccgcttgctcaaatcctgcatgatacggggtatcaggtgcagggatcggatatcgagaagcagattttcactcaggctgcccttgaaaaaagaaatatcccgatctatccgttcagcgccgataacatcaaacccggcttaacggtaatcgccggaaacgcattccctgattctcatccggaaattgcaaaggcgctcgatgaagggattcctgtcatcagatatcataaatttttagctgaatatatgaaaaaatacacaagtgtcgcggtaacgggcgcacacggcaagacgtccacaacgggcctcttggcacacgtgatgcagcaggcgaagccgacttcgtttcttatcggggacggaacgggcagaggaaatgaaagcagcgaatactttgtatttgaagcttgcgagtaccgccgtcatttcttaagctatcagcctgattatgcgattatgacgaatattgattttgaccaccctgattatttcgccaacattgacgatgtgtttgatgctttccaaaacatggcgcttcaagtcaacaaaggcatcattgcctgcggtgatgacgagtacctgccgaaaattcacgccaatgtgcctgtcgtttattacggcacgggagaagaaaacgattttcaagcgagaaacatcgtaaaaaatacggaaggcacgacatttgacgtctttgtccgcaatacgttttacgatacgttctacatcccggcatacggccatcataatgtcctcaattccttagcggtcattgcgctctgccactatgaagaaatagacgtgaacatgattaagctcggacttgaatcattcggcggcgtcaaacgcagattcaatgaaaaagtgatcggcagccaggtactgatcgacgactacgcccaccatccgactgaaatcaaagtcacgattgaggcggcgcgccaaaaatatcccgaacgtgaaatcatcgcggtatttcagccgcatacgtttacacggacgcaatcattcctggatgaattcgcagaaagcttaagcgcggccgaccgcgtgtatctgtgcgacattttcggctctgcccgtgagaacgtcggcaagctcacgatcacggatcttcaggaaaaaatcgataacgcagaactcattgaagaaaatgacacttccgtgttaaaagcgcatgaaggcgcagtactgatcttcatgggcgccggagacattcaaaaatatatgagggcctatgaaaacgtcatagcgtaacgaaaaagcagtggggctctcactgcttttttgcgcgtgctgcaaagggatttaccgataaacggagaaatagtatacatacagacctttcatatatgtttatcattttaagaattgggtatataccactatatcctgcattaaggaggtattagatgatcatcattctttacttaagcgtcgcactcattgccgttgcatttctcatcctcgtcatctatctgtccaaaacattaaagtccgtgcagatgactttaacaaacgtagcctcgactttagacggccttgaagggcagatgaaaggcattaccgcagagacaaccgagctgttacataagacaaaccgtctcgcggaagacattcaggaaaaatcagagaaattaaatacggttgtccatgctgtccaggaagtgggaacttccgtccagcagtttaatacatccataaagcaggcagcaggttctgttacggcctctgtaagagagaatcaggataagatcagtcaggttgtcacctggagccaggccgctatggaaatatgggacaagtggaagcaaaagaaaaaaacatcgctttaatcataagaaaaatccactaaggaggaatcataatgagcaaagatggaatcaatagtaaggattttttaatcggaacgctgatcgggggaattatcggcgcgacaacggcgttgtttctggcgcctaaatcaggtaaggagctgcgcgacgatctcggcagtcaggcttctgcgttaaaggataagacggacagaatgacggccgacgcgaaagaaaaaggctctcaatatgtcagcatcgccaaggacaaaacatctaatatcacccagctggtagctgatcagtcaggtcagattatgaataaagtgaaggatttaaaagaccgttctaagagcacactaaccgagaaagccgaagagacgagaagcgaaatgcaggacacggcccaaagcatcaaggccgaagcggaagacgccggggaaaaagccggtcaggcaaatcgctgatcttcaataaggagagataaccgacatgacaaaacagctgatatcgtctgaagaagagttcaaaaatgccgctgagaaagaaaacacgctcgtgtttttaaaacacagcacaacctgcccgatcagccaagccgcgtttcaggagtttgacgcctttgcatcggagcattcagaagtaccttcttattacctgcatgtgcaggacagccggccgctttcaaactatatcgccgaggcatacggcgtgaaacatgaaagcccgcaagtattcgttattacaaacggcgaagtgaaatggcacgcgtctcattcacaaatcacaaaaaacgcaatagagcagcacctttcataattgctggccgccggttgataccggcggtttttttttgaaaaaaactattgatcatttcagccggatcatgtaggatatcaatatatactgcttcaacgcataaaagcttaaaagcgtttttgtgataaagtcgaatgtgaaaaaatttattatttcatattcctattttcgcataactgtagtaagatgcatgttaaccattaaaataaaacatagcatagaagggatgaaaaagatgagcaacaaggaattagagagtctaagacagcaggcagacgcactaaacttagaaatccttaaattaatcaatgaacgcggagccgttgtaaaagaaatcggtaaagcaaaggaagcacagggtgtcaaccgatttgaccctgtcagagagcgtacaatgcttaaccgcattattgaaagcaatgacggcccatttgaaaactcaacgatccagcatattttcaaagaaattttcaaagccggacttgaacttcaagaagaggatcacagcaaagcgttgctcgtctcccggaagaaaaaagcagaagatacgatcgttgacattaaaggtgaaaaaatcggtgacggcgatcagagattcatcgtcggaccttgtgccgtagaaagctatgagcaggttgccgaagtcgcggccgcagcgaaaaaacaaggcattaaaatcctgcgcgggggcgcgtttaaaccccgcacaagtccgtatgatttccaaggtctcggcgtagaaggcctgcaaattcttaaacgcgtcgctgatgaatatgacctcgcggtgatcagtgaaatcgtaacgcccgcccacattgagcaagcgattgattacattgacgtcattcagatcggcgcgcggaacatgcaaaactttgaattgctgaaagccgccggttccgttaaaaagccggtattgttaaaacgcggtcttgccgcaacaatttcagagttcatcaatgcagctgaatacatcatgtcacaaggaaacgaccaaatcattctttgtgagcgcggaatcagaacgtacgaaacggcaacgagaaacacactcgacatttctgccgtgccgattttgaaacaggaaactcacttgccggtgtttgttgacgtcacacactcaacaggccgccgcgatctcctgcttccgacagcaaaagcggcgcttgcgatcggcgctgacggcgtgatggccgaagtacaccctgatccttccgttgccctttcagactctgcgcagcagatggatatccctgaattcgagaaatggctgaacgaattaaagccgatgctgaaagtaaaagcataatacaacgttccgctctttaaaggccgcctcgcgcggcttttttttcgtatcttcattttatttaattataaaatgaaagtgaacgttttcatcattgggaaaaacgtgtataatttcatgagagatatttaaatttgatgaataatgaaaaataatgtacactactgacttacgcttacaatcataaacgacagaatgcgaaatcgtacgacatttctttacataaagtgtttatgctatagataaggataagtgtatccagtaaaaggagtggtttcagtgagcaacattacgatatacgatgtggccagagaagcaaatgtcagtatggcgactgtttcccgcgtcgtgaacggcaacccgaatgtaaaaccgacgaccagaaaaaaagtattggaagccattgaccggctcggctaccgcccgaacgcggtggcaagagggcttgcaagcaaaaaaacgacaacggtcggcgtcatcatccctgatatctcaagcattttctactcggaacttgcgcgtggaattgaagatatcgcgacgatgtacaaatataatattatcttaagcaactcggatcaaaatcttgagaaagaactgcatctgttaaatacgatgctcggcaaacaagtggacggtatcgtatttatgggcggcaacattacggacgagcatgtcgaagaatttaagcgctctcctgtgccgatcgtcttggctgcatcagtggaagaacagggcgagacgccttctgtcgccattgattatgaacaggcgatttatgatgccgttaagcttttcattgataaagggcatcgcgatattgcattcgtctccggaccgatgcaagagccgatcaaccgttcgaaaaaactgcaagggtacaaacgggcgcttgaagaagcggcgattccgtttaacgagcaattcgtagcggaaggcgattacacttatgattccggtatggaggcgcttcaaagcttgatgggccttgaccggaaaccgacggcgattctttctgcgacggatgaaatggccctcggcattatccatgcggcccaagatcaaggtctttcgatacctgatgatcttgatattatcggttttgacaatacgagattgagcctgatggtccgccctcagctttcaacagtcgtgcagcctacgtacgatatcggcgccgtggcgatgagacttttgacaaaactgatgaacaaagagccggttgaagagcatatcgtcgaattgcctcaccgcatcgaattaagacaatcaaccaagtcataaaaaaacggaaaagcaagcttcactctgaggggtggaatcttgcttttttacttgagtaaggagaagatatgaaacgttttgattatctgacgcccgttggctttatgttaggctgtattattgtcgcaatcggtattctgtcagggacgggactggcgggaatcagttcatttttggatctgacttcttttttaatcgtcacaggcggccttgccgcggcggtctttatcagctttccgccgagggatttaaagaaaaccccttctgttctgaaacaggtattctcccgtcaggatgacaatgtgaaagagcttgtcagagtatttgtcagcctttcggagcaggcgcgcaggcaggggctgctgtctctggatgaccaggcgcgggagatcaaggatccgtttttaaaaaaagggcttttgcttgcgattgacggctgggacgaggaaacgatccggctggtgatggattctgagatcgccgcaatggaagaaagacacagaaaaggaagacgcgtttttgaaaaagctggtgatttcgcacccgcctggggaatgatcgggacgctcgtcggactcgttctcatgctcaaaaacttaaatgacccgcataccctcggaccgaacatggccgttgcgctattgacgacgctgtacggagcgctgcttgccaatttggtgtttatcccaatcgcggcaaagcttgaagaaaaaacggaaagtgaaattttcatcaaacaggtcatgatcgaaggggttgtcggcatccaatcgggcaaaaatccccgcaacctcgaaagtcagctcgtcgtcttcagctcaagagaagactggcgtaaaggacagcctgcgaacaagaaaaagggcgctgtccatgaagcttagaaaagagcgttttgaaagaagaaacaaaccggaacattccggcggttcaccgagatggatggtgacgttcgctgacttgatcacgctcattctcgtgttctttatcttgcttttttcgatgtcgcaaatagacgcggaaaaatttcaatctgccgtttcatcgattcatacaaacggcagcggaggtgaaccggcgtcatcagacaaagcaaacgaaaataaagaacaggatttgctgttacaaaacgtgaagacatacataaaagcgcatcatttgagttccaaattgacggcgaagcgcgatgagcgcggagtggttcttgtgctgcaggaggccgttctgtttcagacgggaaaagcggatgtgctgaaaaacgccgagccggttctgcatcagatcgcggtgcttttaaaaacaattccgaatgacatacaggtagaaggccatacggacagccgccggatttccacctatcaattcccgtcgaactgggagctgtcgtctgcaagagcggcgagtgtgatccagtattttaccgcgaatgaagacttttccgccaaacggtttatctctgccgggtatgcggatacgaaacctgtgaaggacaacaaaagtcccggacatatgaaagaaaaccgccgtgtagaaatcgtgatcaaaaaaacgacctcctcataaggtcgttttttattttgttttataccgctgctcagaccggatggcaaaaagtgctttttccacggtttgggcatttttttctgaaatttcttctttgcgtggaatcggaggatataattgttcaggatcactccaaaaagcgggcagcgtgcagggggaatgcttctgccatttatcaatccatttctgcggtatgcgctccccgggatcaatccctttcatctcaagccaaatgcggctccatgctctcgggacgactctccaaatatcgtatccgccgccgccgaccgcgatccatctgccgctgcaatattgatgggctaatgaatgagcgagccgcgggatctcctgataaatggagattgtattggacaggtgtgtcaatgggtcgtaataatgggcgtccgcaccgttttgggtaagaatcacatccggcttaaaaaaagccgcaatttcagaggcggccgttttgtaagcgtggagaaaggaatcgtcctctgtgaaagcgtccagcggaatgttaaaagaatagccgtagccttgcccgcttcctttttccagtacttgtcccgtcccgggaaataaataacgcccggtctcgtgaaaagaaacagtgcagacatcagacctgtcgtaaaacgtaaattgaacgccgtcgccgtggtgggcgtctgtatcaatgtataacacttttgccccgtagttcttctggatgtattggatggccacggcgctgtcattatagatacaaaagcctgacgccctgccgcggaagccgtggtgaaggcctcctcctaaattgcaggcatgcctggcttgtcccgtcatgacataatctgccgccgttaaggtgccgcccaccagaagcgacgcagcttcatgcatgccggcaaaaacgggggtgtcttccgttccgagaccgtagctttctccttctgcggcagggagccggcccgcacccgcaagttccaccgcctgtatataatcctccgtatgaacgagagccagctcttctttagtggccgtgcgcggtttgacgatgtctccatcgtcaaacgcgtccgccgcctgaagcagatcgtatgttaaaagcacgcgctgctgattgaacggatgatcctgatgaaattgatacgtctgataagaaggcgagtaaacaaaaacgctgtctctcatggctgatccctcaaatgtttcggccataagacattgtatccggcttcatgaacggcacggataaaagggagcggattcatcgtcttcacccggaagacgagaatgttcgacccggcggaatcatggggatagacgagcacactcaggatttgcagctgaagatcacggcacatgcagctgagatcagcaaggctttttgtcatatccgtcaccaggatttccacctgtgatcccggctgggccgcgcctgtcaggctgacgaaagtccggagcacgtcggttttcgttaaaatgcccgtcagcttatgatttaccgtaatcggcagacagccgatgccgtgctcataaaaggaagcggatatttcttccacaaagtcaagcggatgggcgcagatgacattccgcttcataatggtctccactttgtttgtcagaaacgcgccgcgttccttttgttcgaagctgccggggccggcctgtttaatgtctctgtctgtgacaataccggtgacgtgcagctcgtcgtcgatgacagggagatggcggatatgatataccttcattttacggacggctgtttcaatggagtcgtgttttgagacggtgatgacgtcccgtttcatgatttgttctgcaatcatctttttatcccctttgtatgtcagtcaatacataaaccgctgataaaaacgaagcctgtcgaactgttcaattgactcctgactgacgtgcctgccgatgcgggccatcagacaattggccggatgagagctgatttccggttcatccgttgcaaaccagacaagacccccggcattcatcatcttttccatgatctttctgtattcccacacatcttttttcattccttttaaatcccaatgccagtaatattccgtcgtcatgatgatgtagcgttccatctgttcatccatcatgctgactgtcagcaacgtttttccgacagaacagcccctgtagccgggagcgacctcgatcgccccgagctcaaggagatcttccatattgccgtcagaccaccgttcaagcggatcaggatataaatacgtcacatagccgataatcgtctgtccgtccctggcgataatgatccgaccttcaggaagcccggcgatctcgattaacgctttgtgctgttcatgaggaaggcgaaaggctgtcaggccttcatgaaactcatactgtgctaggtcctttggaggaacgggcccttctaccaatagagggccggctgctgtctgaattgatgaagaatggtacgttttatgatgtttcactgattcaccgcctgtcggttcttaataaaaacacatctctcttaagcataacaaaatataaagcgttttcaatagtgttgtaatttatattttaaaaattgagaaaactgtgaacatctactataattagtctatagataagcaaagggggatgttgcatgaatttgaaagcgttgccggcggaaaaggggaattatcatctgcgaaattatgaggaaacgtaccgcagcttcgattggaaagaggtcgaagcggagttttcctggcatcagacggggaagctgaatgcggcgtacgaagcaattgaccgtcatgccgaatcatttcgaaaaaacaaagtagcgctgtattacaaggacgcaaatcggaatgaaaaatacacatttaaagaaatgatggaggaatcgaaccgggcgggaaatgtactgagacggtatggaaacgtggaaaaaggggaccgcgtttttattttcatgccgcgttcgccggagctgtactttatcatgctcggcgcaattaaaatcggtgcgatcgccggccctttatttgaagcgtttatggaaggcgccgtcaaagaccgcctgttgaacagccaggcaaaggttgtcgtgacgacacctgaactggccgaacggattccggcggacagcctgcccgacctcgagcatattttcattgtcggcggcagcaaagaagcgggagataaaatcattcattatgataaagcggctgagggagaaagcacgagacttgatattgaatggatggacagaagagacggctacctgcttcactacacatcaggatctaccggaacgcccaaaggtgtgctccacgttcatgaagccatgattcagcaataccagaccggcaagtgggtgcttgatcttaaagaagacgatatttattggtgcactgcggacccgggctgggtgaccgggacggtgtacgggatatttgcgccgtggctgaacggagcggcgaatgtgatcgtcggcggcagattcagtccggaaaactggtacggcacgattgagaagctcggtgtcagtgtctggtacagcgctccgacggctttcagaatgcttatgggcgccggagatgaaatggcatccaaatttgaccttacttcacttcgtcacgtcctgagtgtcggagaacctttgaaccccgaggtcatcaagtggggacataaagtattcggcaagcgcatccacgacacgtggtggatgacagaaacgggcggacagctcatctgcaattatccttgcatggagatcaagccgggctcaatggggaaaccgattccgggagtggaagcggcgatcgttgacaatcagggaaatgagcttccgccgtaccgaatgggaaatctcgccattaaaaagggctggccgtcgatgatggattccatttggaacaacaaagagaaatatgattcttattttatgccgggcggctggtatgtttccggagattctgcttatatggatgaagacggttatttttggttccaaggcagagtcgatgatgtcatcatgacatccggcgagcgcgtcggcccgtttgaagtcgaaagcaaacttgttgaacatccggcgattgccgaagccggcgtcatcggaaagccggaccctgtccggggagaaattattaaagcgtttatcgcgctcagagaagggcatgagccatccgatcagctgaaggaggacattcgcctctttgtaaaacaggggcttgccgcgcatgccgcaccgcgggaaattgaattcaaagataaacttccgaaaacacggagcggaaaaatcatgagacgtgtgctgaaggcatgggagctgaacctgccggcaggcgacctgtccacaatggaagattaaagacggcgttgacatcgtatcttatttatgttaaaaatgagtaagcttcatacgaaaaggttttgattgagacaagtaggatatctgattgttccagagagctgatggccggtgaaaatcagcacataagatatgccgaatacactcatgaaccgcttttgcgaacaaagctattccaaggctttcagtagtgaaagaacggacacggtccgttatcaaaaagagtgataaaagcttttttatgtttttattagtagggtggtaccgcgattatatcgtcccttcgttttaaacgaaggggcgttttttattttcataaacaaaggagcagacaaaatgactaacttattagaggatttatcattccgcggcttaatccagcaaatgacggatgaagaaggactgaataaacagctgagcgaagaaaaaatccgtttatactcagggtttgacccgacggctgacagcctgcacatcggacaccttctgccgatattgacactgcgccgtttccagcttgcaggccaccatccgattgcgcttgtaggcggcgcgacgggactgatcggcgatccgagcggcaaaaaagcggagcgtacgttaaatactcaggatatcgttgtcgaatggtcgcaaaaaattaaaaatcagctttcccgatttttagatttcgaggcaggagaaaaccccgctgtcatagcgaacaactttgattggatcggaaagctgagcatcattgaatttctccgtgacgtcggaaagaacttcggaattaactacatgcttgcgaaagatactgtaagctcaagaattgaaaccggaatttcttacacggaattcagctacatgatcctgcaatcctacgattttctgaatctgtacagagaaaagaactgcaaactccaaatcggaggcagtgaccagtggggcaacatcacggccggtcttgaactgatcagaaaatcagaagaagaaggggcgaaagctttcggtcttaccattccgctcgtcacaaaagctgacggcacgaaattcggcaaaacggaaggcggcgccatttggcttgataaagaaaaaacatcgccgtacgaattctaccagttctggatcaatactgatgaccgcgacgtcgtcaaatacttaaaatactttactttcttgtcaaaagaggaaattgaagcttatgctgaaaaaacggagacagctcctgagaaaagagaagcgcagaaacgtctcgctgaagaggtgacggttcttgtacacggccgtgaagcgcttgagcaggccgttcatatctcccaggcgctgttcagcggcaatattaaagagctttccgctcaagacgtcaaggtaggatttaaagatgtaccttcgtttgaaaaagaccgctctcaagaactgtctttagtagacgtgctagtggaatctaaactgtcgccttcaaaacggcaggcccgcgaagacattcaaaacggagctgtttacattaacggcgagcgccagacggacatcgggcatcttctgactgcggaagaccgcattgaagatcaatttaccgtactgcgccgcggaaagaaaaaatacttcctgatcacgtactgaaaataaaaagcagtccggccgctccatgcggcaggctgcttttttatgttttgtgaatactgcacggggaaatgagtacagtacatagtataagcaaaacagggaaggggtgctgcgccgtgaatttcatgtttaccatcgccaaagaaagattgcagcgggatcattgggaacagcagcaaagcataaacgccgaagccgaggaatcagagacggaagaagaaaatccgacatcataaaggtaaagcctccattctatggaatggaggcttttgattgtcaccatatcagcctgacggcggccatcagcacgactcccgtgatgaccgtgatggataagctttttgtcagcatcgcgcaaagcaatgtcgggatgagaacgatcattgctttccaatcaaaggtcaaagcgctgtttgttttcacaatcatgttttccgttaccagagccgtcaaaatgcaaagcggaataaaggagagccattttaaagccaattcaggcatctgaatgttccggacaaatataaacggaacaatgcgcggcacaagtgtaacaatcatgcagccgagtataatccagatcatttgtgtgctgatgctcatttgtccgtcaccaccccgatcgttgccacaattacggttgagacgatgaccgcgatgtgtgacgggacgaaatacgataacaagaccataaaaatgatcatatagagaattaaggagaggctgtgcttcagcttttccgaagcggacgactgcaattgcagcacaagcagcgccgcaaacatagcgggcaaagcaaagtccaggccgagagcgtaaggatcagatatccattgtccgagaagcccgcccatcacgcaggaaataacccagcacatgtaagcggttatattgaggccgttcatccacttatcgtataacctgccgttctgagccgctttgttcaccgctactccgaaagattcgtcagtaagcagagccccgaagccgatatttttcgccagagagtatttcgtgaaatacggcgcgatggtcaggctcagcagaaggtgacgcagattgacgataaacgtcgttaaaataatggcggaaatcggactcccggaaacaaggagcgagcaaataataaattgggcggcgccggcatagacacacaaggataacaaacagatttcaagaatgcttagatgagaggcaaccccgacgatgccgaaagcaaaaccgatgctcatatagcccagcagcgtaggcacacaatcccgcaccccctgtaaaaacgtatcgttcatttcccgggaaacggcggttttttgcacttctgtattaatcattttttatactcctttcatagagattataatgataacgactaatgaaaaaatcaaagaaaatacggttcacatttatatgaaccgatttccggtgacgacatgaaataacgaatggttttgtttcatcaggccttcaactttttcagccccgacttctttcacaagctctgcgaacatcagatcgtgcctcatatattccatggccacgagaacgagagcggggtcttctgatttaatggcccaggcattcgtctgcggagaaaaattggcgattaagacttctttattatctcgggcagctatcgttaatcttccgcccatccgtttctccgccacttcaggagacatattatgatttgtcgtatttccgagcttcacttccggagggccgaacacaatcgaaaagacgggcaattgttcggcggcgcgtttattagcggcttcttgaataaagggaatctgctgttcccagacagacagccacaactcttcctcggctttttcaatcatttccttcatctcattgatgacatgatcatttgtgctgatgcggcggatgacattcatctcctgctcgctttccagcgccaataacttttcctcaaggtagccgaatgagctctcgaaatcgtgccggagccggtcgattaattcctttccggccagcggggcatatgtaaccggatcagacggcacaatatggacagcgcctttatcaactaatttccccaatacctcatagatcattgagcgggggacgcctgaccttttgctgatttcatatccggtaacaggcgagtgtttcaacaagccgatatatgctttacattcatattgagaaaatccaaacttctgtaattctttcagaacatcatccataaacatcctccgtagtggttattcatgaaactactataatgtaagcggttatatcttgtcaatgggacttgagtgctgaaagaaaggttcgcctgttttgtcgctttccaacttagtttatgatgagttacatgtatggcttttgtgaaaaacgttgccgtagacccacacgaatgccgtttgatacgataaatacaagaagtcaaaaagaggaggatcacggtggaaaacacctctaaaatcgcttttttatcggttataagcaattccctggtcgtcatgctcaaaatagtggtggggataataaccggatctgtcgcgatactttcagaagccattcattcttttttagatttgatcgccgccttcatcgcctttatctccgtcaggatttcaaaaaagccggctgatacagggcatccgtacggtcatggaaaagtcgagaatctgtcggggaccatcgagacgatgctgatttttgcggcagggatttggatgatatatgaatgcgttcaaaaactggtcaacccggctccggttcatctgcccgtattgggaatcgttgtgatgcttgcgggggctctcattaatttgatcgtttcgaagttcgtaaaaagagaagccgaaaaggttaattccgtggcaatgaaatcgaatgccctgcatttactgactgacgtgtacacatcattaggcgtagcggcaagccttttggtcgttaccttaacggagtggtacatacttgatcctattataggtatggtgctggcggtgtatatcatatatgaagcgtttaagttaatgaaagaagcattcccgccgctgattgatacccgtttgtcggaagaggaagaaaaaacaattttaaagattatcgaaacatttcaacaggaatttattgaaattcacgattttcgtacaagacgctccggcccgcaggagtatattgattttcacttggtcgtagcctctcacgtggcgattaaagacgtgcacgacctgtgtgaccgcattgaaagagctattacgaatgaattcaaacaagcacaggtaatgattcaccccgagccggagagcgagaggaagaaataaatcgatcttaagtttgcgtttgttccctgcaaaatgcctgcaaaaggcccgtttccacgggtctttttgttgtataaatgactatttctcgctcatatgagagagaagcttatacacgtgaggggtacatttcatacgttatgttgtaaagaaaaagggaggtgaacagaattgaacgctatttctgttaaagaaattgaacatggagttgccgttgcggaaagagaaggtttaggggagtatttataccaagaaccggtttccaaaaaatgttcgcgccgttcccgcagcagaaaacggacacaccgttcccgcagcagaagacggagtcatcaccggacacaccgctcccgcagcagaagacggacccatcaccggacacaccgttcccgcagcagaagacggacgcatcaccggacacaccgttcccgcagcagaagacggacgcatcgccggacacaccgttcccgcagcagacggtcacatcaaaaacgtacccgcaagcgctgttttaaatgctgaagcagactctattacaagtaatggagatctgctataatggcaagagaactgcataaaagatccggtatcatcatctgcggacactgaactgacaacatggcgctgtttgttcgtgtccgttttttatgtcaaaaaagatgccggaggataaaaaggaagggatgacgccgaatgaagctgaatgaggaattttataactctgaaggaaagacagtctcttcgcaaaacataagcagcaagcttttgcatatcacggacagcgggcatatcagcattgacttcatcagcataagcaggctgcggaaggcttcaaaaatcgcgatcttaggtgacagcgtcgcccgggggctgcgcgcggaatacggctttggtgacattctgaaagaccggacagacgctgaaataaccaatctgtctgtcagcggcgttaatatgagcaaccacggaagcgataacatttatcagcaagcgcttaaaacaaagggacatgatgtcatcattgtccagggaacagatgatgattggtgcaaccacattcccatcggcacagatgaaaaggatatcaccacattttacggaggcttctgtcaagtgattcagcagctgcgaagcggaaataaaggcgcgagcaccattgtggtgaccccaacgagacaagcaaaaatatcaaaaggaaaaatcgtccgccgtgatactgataaaaataaactgggcctgaagctggctgactatgtgaaagcccaaaaagaagcctgcacactcctctctgtaccgtatgccgacctgtttgatacagatctcatcgacccgtataatcccgctttccgcagcatgtgcatgtcagaaggtcttcatccgaacgagaaagggcatcaaatcatttttcaggaaatctgccggaattattattactattacgggtaacacagcgctgcatgattattttcggccttgcttttctaaaagctcaattattctttgagatgcgtgtttttgcgctctcaaaagcgaaatgatattaccggtaaaaccgattaaaatgatcagcagcaaaatgatcatccacataagtgaacctcccgtcgagtgttgaaaaacccactctttattttacttattatggatggggaagagaataggtctaactattggtgtttctttatcaatccataaaaaaatgcacagactgaacgggtctgtgcatttttattcgcttatttcagcaggttcaatgattcacgattaaaggcttccaaatcgtcaggcgttctgctcgttacgatgttatggctcacgatgacttcttcatctttataatgtgcgccggcattgattaagtctttgcggatgctgcggaatcccgtgatatcttttcctttaagaaggtcggtatcaatcagcagctgcgggccgtggcagatcgcgaaaacgggtttctgattttccacgaatgatttagtgaattcacccgggcggtcatctccccgcagaagatctggtgaaaagcctccgggaatcaataacgcatcgaattccttggggtctgcgtctgagatcgcttgatcgatctttactttctcaccgtgcttgcccgtcacttctttccctgcttctaaatctattgtcaccacactgtggcccgcttctttaaatgcttccgccgggcttgtatattcaatatcctcaaattgatctgtcatcagaactgcgatttttttgctcatcatcatgcctcctgtgaatttgtatatgacaagaatatcaggcggattgccgcctcacaacgtatttgcttgaagatacggcatgaaaaaagacccctctgaaaaagaggagccaaaaggtacggaggtctgctgaggcaagaaatcgaaccaattactttttgcgtctttttttatcctttttacacccgcatttccccggatcgcccggatcaatgacttcgtgaattgtttcttcctgataaacgtggcggggaacataacggatatgttctctgttaatgtgtttgatgggatggacgtaaaccacttctttgtcagtatacttgtcagtcacaatatacttagggtcacagtaatacactttcgattttttacccattcatctcacctcccgtactttattaaatgctgaaaaggaggattttgcatcggacaagtacactatggcaagtccacaattttccatccgcaatttcgtttatctggtttttcctgaatccgtctcaaattggaatggctaaccctttttgaacggggaaatctataaaaaagaattcaaaaacgattcttttttcaggtcaatcgagatgcatacatctttagggggatttcagaatgctcgatgaaaaaacgattgaaatcattaaaagcacagtgccggtcttagaagagcatggtgaagaaatcacaggccgattttatgacctgctttttcagcatcaccctgagctgctgaatatctttaatcagacgaatcaaaagaaaaaaacacagcgtacggccttgtcgaatgctgtgattgcggccgcagccaatattgaccggctggaaaacatagtccccgtcgtcaaacaaatcagccataagcaccggagtatcggtgttaagcccgagcattatccaatcgttggaaagtacttgttaatcgcgataaaggatgtgctaaaagacggggctgctcctgaggtcattcaggcatgggaaaaagcatacggcgtcattgcagacgcttttatcggaattgagaaggacatgtataaacaagcggaaacgcaaaaaggcggctggaaagacgataaggcgtttaaaattgataaaaaggtaaaagaaagcaaagagataacgtcgttttatttaaaaccggaagacggacaagttctccccgaattcaaagcgggacagtatatcagtgtaaaagtatacattccggacacgggttatacgcatatccgccagtacagtttgtcggatgtatccggtaaggattattaccggatttccgtgaaaaaagacggaattgtttcttcatatctgcatgaccaattacacgaaaaggattcaattgagatcagcgctccggccggggatttcgtattagaccctgattccaaaaagaatctggttctcatcagtgccggtgtcggaattaccccgatgatcagcatgttaaagacggttgccaaaacccagccgcagcgaaacgttctctttatccatgcggcaaggagcggagagtatcatgcgctgcggcatgaagctgaagaagccgcggaacactcatccgctgacaccgtctttatttacagcgaaccgtccgaacaagaccgttcagaaaacattcgttttcgggaaggccggattgacaaacagctgttagaagaagtgatgacagataaagatgctgatttttacctgtgcggatccccgtcgttcattaaagaaatgaaaaagctgatttctgaattcaatataacgccggaatccattcactatgaattatttaaaccgcagctgagtatggtgtgatgtaacaacatcttagacagtctgtttaacagactgtctttatatgtttaatacgaaaggttttccccataacatagaattttcaagcaggtaaatcatattcaaagtcgtattatcctaaaaagacaaagttttttatgtcccaacatacttcagtagccggatggaaaggttctcttcctgatacttcaactggaacattggctcctgctcttgtgaataaaatagcaatgctctaataataagaggtggctcaatggcagtttttgttgaaaaaacgctccaaggtctaaaagaattaattgatgaaaaaggccgcttgaacattttagggaatgaaggaacgcttttagaaacagaatgtactttctttaaaggtgcaacagatctggagattgagagttttgagaagaaaataaaagtctcacttcctgaagattataaaacctttttaaaattgcataacggagccagaatatttgatttgttgatttacggtgagaatgtaggtgggggtttgcatattcttgatttagaagagattgaaaagtatatgcaaaatggttttttagagcctcagtttattcctgtcgcacatctgttagacggatgttatttgttaattgacaaaaccaaaatttctacagatccaaactatttatggttccgcggatttattgagtatgaaccaatgaaacttaattttgagatatttttagatcggtatattttgtgtcaaggagcaaatttttgggagtggaatatctataccgctgaaaattattataggactcaccagggtgataaggattaacctttcctacagttgggttggttcatttttgcggttagacttcgatttgaacttttaaaaataggtttaatttgggagacgaaccgattaattggtgtatagatgatttataaaaagcgcagatactctgcgcttttttatttaagtattttccggatcattcgcagcccgtttttggaagaaggataacggaaagcgaggtcgaagcggttcgtttgtttgacgacgctttttttgtgcgtaaatgcgttaaagctgttaaatccgtgatagctgccgatgccgctttctccgacgccgccgaatggcaaatacggtgtcgcgacgtgcattaacgtatcattgacacagccgccgccaaatgacagattctctaaaacagttcgctcgattcctttgtttgttgtgaagacataaagagcgagcggctttgggcgtgattggactttctcgatgacttcatcgatatcgccgtatgtaaacagcggaagaatcggcccgaaaatctcctcctgcattactggagagtcatccttcacttgatctagaatcgtcggcgctattttgtggtgttcaggattaaattgtccgcctgtaagcgggacgccatcattcagaaagctgagcagccgctgatagtggcgttcactgacgattttgccgtactgcggattttgttcaggctgagggccgtaaaattcactgatcgcatgcttcatttcttctatgagcttcgttttgatatcttggtggacaactaaataatccggtgcgatgcaggtttgccctgcatttgtaaatttcccgaagacgatgcgtttggcggcaagctgtatatcagcatccttatggacaatgcagggacttttgccgccgagctccaaggtaacgggaattaattgtttggaggcggcctccataacgatttttcccacggcaacgcttcctgtgaagaaaatatagtcaaagggctgctgtaataaaacagtgctgacgtcgggcccgccctccgccatagcgacataatcactcggaaaaacgctgctgataagtttagaaagaacagcggaaaccgcaggcgtatattctgacggtttgagaacgactgtgtttccggccgcaatggctccaatcaagggtgaaagcgccagctgcaagggataattccaaggcgcaatcaccaaaacgattccatatggctcagggataatcatgcttttcgagcccaggtgagtcagaggcgttttgactcgcttcggtttgacccattttctcagccgcttcatcacaaaactgatttcttccagaacaattccgatttctgtcgtgtacgcctcctgttcggatttgtggagatcctgatagagagcggctgctatatcggcttcttgtgttttgatggcttgtttcagcttttgcaatatgttcagccttgattctagcggtctcgtatgccccgccgcaaaataggctttgtgcttgctgacgatagaggggatgctgttcattccgtctctcctttttgtaagtatgatgattcattatgtaaaaaatcgcttctgcctgtcaaatgattaaggtgagtcagaaaaaataacaaactcatttctgcgtttcggcaggaatttgatgaaaaagagaattctttttgcggcattatctgttgcaggcattatggggttttctaatgtacatgtagttgaaaagccggttggcacataaaaaaaagccccggacaggggcttttttaataaagagagggaacagcccaaaagaaaaaccccggaaacattgtcatcacaacatgtccggggtttaatccaatgctctttaaagagcgttttacttaacgggagtagaactcaacgataagcgcttcgttaatttccggagcaagctcagagcgctctggaagacgagtgaatgtaccttcaagcttttcagcgtcgaaagtaaggtactcaggaacgaagttgtttacttctacagattctttgatgatagaaaggtttcttgatttttcgcgaacaccgattgtttgaccaggttttacttggtaagacggaatgtcaacgcggcttccgtcaacaaggatgtgaccgtggttaactaattggcgagcttgacggcgagtgcgtgcaagaccgagcttgtacacaacgttatcaagacgtgcatctaaaagaatcatgaagttttcgccgtgtttaccagtcatttttgccgctttgtcaaacaatgtgcggaattgacgttcgtttacaccgtacatgtgacgaagtttttgcttttcttgcaattgcaaaccgtattctgatagttttttacgctgtcccggaccgtggggacctggtgcgtaagggcgtttttctaattctttacctgtaccgctaagagagattcctaaacggcgggacagtttccaagatggacctgtatagcgagccataatgtgactcctcctttggttttattttgtggaaaataaaaaccgtctgttcgatccgaccgtgcacattttgttttcatgtatcctcgctccagcagcagagagttacacgatacaccttacagctaaggaacaaaatgcaaacacagaagctgaacaaaaaggctgcaatatttcacacaaagaacattatatgatttttccccgccgccgtcaaccatttctccatgaagagtgccggtttatgatataatgtacaaaaatgagtagtacatgtttaggtgataaaaatgaaaaaacaaacaattgatgaagtgacggcctttcatcagaaaatgctttcttttttcttaacgaaatctgaatccgtctcattatccgactcgctgttatggctggcctcagctctagaatcctgctttacatctctttcattgaccctttcaccggcagaatcaacacgtttcaccataaaaacagaagatgaaccgcattatgctccgctgaaagagagtgacggccgttttatgatcaggaatcagacgtccggcagatccttttatctgcgctcggaaggcgggctgccgatcccggaatcattgcctgagatcgttactcagtttatcaatcaatctgtgagacaaagcgggctgtttgacaaaacgaagcatcagcggaaaattcacagaatgacagaaatgttccattcgcttttggatcaaaatgaggttttggaaaaactgcaggcaagtttgagtacggctttccggtctttccgcttttcactgtttatcacgcaggatcaggatacggacagacagcttcccgcaaaagaattacatatggatggaaaagatgccgatccgtctgccctgaaggtttatttatcggggagactgctcagaaaaggcaggtcatctgcttacctgccgatcaaaggccagcaggggacttacggggttctgaagacggaggggctgcaggatgccgttctttcgtgcagtactctcagtgaaatgctgctgcttgcgggcgcggcgggaaaagcatttgaaaatgcgcagctctatgagcaatcgaaaaaaagcattgcgaatctggagctcattaatgaaacatcgcgccagctgaatcagcgcctcagactcactgacacgatgcgggaactcgccgccattatgacccaatcatttcatgcggaagaagtggctttttttcatattgatcattttgagacgcaaaatctgcttccgggacataccgctttttttaagacagaacgtgcgaacccctatatcagcattgtgaaagaaaagctgttcgagggagaaaagggcgtgtttatcggcagcggaaagactgtattcggcgaaaacggcttcggctcgctgatggcggtgccgatgatcgaaaatgacaccgtcttcgggttcgcgattttattgaaaaaggatttgtatgcttttacgtttgaaatgtataagctttttcaagcgctcattcaccatgcgacattggcggtcacgaactccatgctgcgcgacaggcttgagcatcttgttcagacagaccagctgacggagctgtattcaagaacctatttggatgagaaaattcaatacagcatgaaaattcataaacggggtgtattcatcctcgttgatatcgataatttcaaaaccattaatgatacatacggtcatcaaacgggagattcgatcctgattcaggtggcctccgttatgaaaaaccatattcgtgagcatgatgtcgctgcaaggtgggggggcgaggagctggctgtctatctgccgaatatcaacgtgtcatccggagaacgcatcgctaaaaggctggttcgcgccatccgggaaaacaccgagccgcgcgtgacgatttcctgcggcgtttcctgctggtcaaagacaggcccgatgccgttgaaaatgctcgttcagcaagcggacgaggcgctttatatcgccaaacggaacggcaaaaaccggctgatcatccaccaaaacagcacgacgacataaaaaaggagccggcctgccggccgggctcctttttttatcctaatcgtttttcaagcgtttcaacaaactttgctaaataggcttcgtccgtttcatcaaaacggtttttcacagggctgtcaatgtccagcacaccgatcacttcaccgtttacgcggatcgggaggacgatttctgactgggaagccgcgtcacaggcgatatgtcccgggaacgcattcacatcggcaatccgctgcacggcgccgttagagtaggcagtgccgcatacgcctctgccgaacgggatgcgcacacaggcaggaagtccttgaaacggtccgagcacgagctcgccctctttagcgaagtaaaaccccgcccagttgacttcatgtaatgaatggtataaaagcgctgatgcattcgcgtaatttgcgatcgcatccgtttcatcttctgtcatggcttcgagctgtttaagcagaagctgataacttttttctttatctccggattgtttttcgacatgaaacatggaaaaccctcactttttctataatatcaaacaaagttccggccgttctgccggcatttgtcgagaagttcttacaggaacggcgcctttctgcttgaattgttacacataaaggggtgagccgtatgaaagtaagcaccaaagacaaaattattaacgccgctgtccagctgtttaaccaaaaaggttattccggcacgtccgtccgtgaaatcgcaaagtcagctgatgttaatgttgcgcacatctcctactattttaaagggaaaggcggattaatggaacatttagtttccgagttttacgaaggctatactgaagcgctggaaaaagccgccgtcagtttgaacggtgaagacgcgcaggaacgcatcctgcgggtgattttcgatattttatcctatcagcacgataaccgtcaactaacgcggtttgtgtaccgggaagtgacgattgattccgtgcttatcagggaaattatgtctacttacttaatgaaagaaaaatatattttccagctggtgattgaagaagggcagtcacgccacagacggctgacgctgcccgtgccgcattttattctgcaattgaaatccctcttgatgatgccgtatcttcagcctcaatacattacagaggtgctctatatgcagcctcatgaaccgtacttttataaaaggtattttgaagaggtgaagatctggatcgaaagcgtgttccgacggcctgatgcggcgcttatgaagtaatgatgcttttgtacgtttcataggaactgccgacatcttccgcttgatgggcgtccgacccgaatatgagcgggatttttttttgcttcgcggtctcagccatccaatcctccatgtatacttccccggcaaacttctttctgagcccggatgtattcacatccagctccattccgtgttctttcacggcgtcaagacagcgggccgcaagctctcttatttgaggtgacatgctgtaagggaaaaggcgtgcgaattttttgacgagcgtgatatggccgacccgttttggcttaaaggggccgagcggtgttacaatggaagaatacacagtttcatagtattgttcatatacggcttcaacgcttccgaagtgcgcggcgagctgctgaaaggcgtgctcgtcaaaatcgaggcagatataagacggaccggtcttcaaaaaatgaacggataaaatgccgtcatccagtgaggggccgtacgtgttcagaaacgccgcggtttcctcttcataccctgtgataaaatcagtttcgagcccggtcagaatgctgatttgtccatcgtattcctttttcagctgtgacagccgctccaaataaacctccatctgtctgagatccatcgcgctgtcctgaagcggtacgggatcttgaaatgacggaggaaggggggcgtgctctgtaaatgtgatcgagtcaaagcctctttccagggccttttcgacatattctttcagcgcatccttcgagccgtgagggcaaaaaggcgtgtggatatgagcgtctcgtttttccatttgtgtcactccattaaaaaattgcagaatcctgccgaaattatgcaaaaagtttttgatttctggtcaaaaaatgttggttacatggtatcataataacaatgaaaacgacagattttctcaatacatatattgaaatctttctgaatacataaaacaccctgacagattaagagaacaacaagggggctcattatggagttagtcatcggattattggttatactgctcgcgctctttgcggcgggctactttttcaggaaaaaaatttatacggaaattgaccggctggagtcatggaagattgaaattttaaaccgttcgatagtggaagaaatgtccaagatcaaacatctgaaaatgaccggagagacggaagagttctttgaaagatggcgcgaagagtgggatgaaattgtcacagcccatctgccgaaagtagaagagctcctttatgatgccgaagagaacgccgacaaataccggtttaaaaaagcgaatcaggtgcttgtccacatcgacgacctcctcactgcagccgaatcaaatatagaaggcatactgcgtgagatcagcgatcttgtgacgagcgaggaaaaaagccgcggagagattgaacaggtgcgtgagcggtattcaaaagcgcgaaaaaaccttctggcgtatagccatctctacggagagctatataacagcctggagacggatctcgacgaaatctggagcggcataaaaaagttcgaagaagagacggaaagcggcaattacatcaaagcgagaaaagtgctgcttgaacaggaccgcagactggatcagcttcaaacatacatagatgacgttccgaaactgctcgctgactgtaaacagaccgtgcctaaccaaattgccaagctgaaagacggctaccgggaaatgacggaaaaaggctacaaattggagcatattcaaatcgaaaaagagctggagacactcaccaatcaattgaaacgggccgaaagcgcgcttttggaagaattagatgtcgacgaagcgtccgccattcttcagctgattgatgaaaccattcaatcgatgtatgaacagctggaaggcgaagtggaagccggacagtccgtattaagcaaaatgcctgagctgatcatcgcgtatgagaagcttgaggaagaaaaagaccgcacaaaaaccgaaacggagctcgtcaaggaaagctatcagctgacggcgggagaaatcggcagacagcatgctttcgaaaaacagctggaaacgatcggccggctccttgagcaggcgagagaaaagcttgacggtgagcatgtcgcttactcgctgctgattgaagaagtcgaggccatcgaaaagcagatggaagaagctcagaaagaacatgccgaataccgtgaaaatctgcaggcgctcagaaaagaagaactgcaggcgcgggaaacgctgatgaatcttcggaaaaccatttctgacacggcccgaatgctgcaaaaaagcaacgtgccgggaattcctgaacaagtcaaggacaagctcgagacggcaaatcatcatatagaagagaccgtcagccaattggaagagctgccgttaaacatggaggaagccgccaaacatctgaccgaagctgaaaaggtggttgcggaagtcagcgaagaggcggaagaacttgtgattcaggtgaagctgattgagcggatcattcagtacggcaaccgtttccgaagccagaatcatattttatccgaacagctgaaagaagcggaacggctgttttacgcttacagctataatgaagcttatgagatggcggcagatgctgttgaaaaagcagctcccggcgccgtgaaaaaaattaaagctgatcaatctgcttcatagacgcacaagcaaaaactgcaccctgatggaaatcagaggtgcagtttttttgtttctcacggaatataaaaagcgcctatggctgatatacatcaaaccgcaggcgctgaatgttacgattttgctttatttaattcgatgggcgggctgataaaaaacgtgatgatgcagccgatgatcgctccggcaatgcccggaagcacccagccgattcccatgctgtaaagcggaagatttgcgtttaagaatgaatctaatgatccgagcggaatgccggctgccttcaaaccgtccaggatactgaacagccccgttccgatcaggcaggcgatatagacttcgcgtctttccttaaagattttatcaataaaggaaagtacgataatgacaatcgccagcgggtaaatggctgataaaataggaactgaaaatgcaataatctcagcaagtccgaaatttgaaatcgccagactgaacagcgtgacaatcgtaaccaccattttgtatgataaagcgggaatcaattttgaaaaatattcgccgcaagatgtgacaagcccgatgcttgtcgttaaacacgcaacggtgatggcggcaccgagaacaatgtttcccagtgaaccgaacaggtaatcagatgaagctgataaaatctttgcgccttcgccgagcggcccgacagcgtccgtgcttgtcgctcccaaataggccaaagataaataaatgaatgtcaaacccgccgctgcaatcagacccgctttaatacaagcggcggcgagcgctttacgctgggtgacgcccctgcttttaacagcgttgacgacaacgacgccgaagacgattgaggcgagcgcatccattgttttatagccttccaaaaatcctttgaacaccggcgttccggaatatgcctgatgtacggcgcccagcccgcccatcggagtgacgatggcttttacgacaatgattaaaataataccgaatttaatgggagtcaaaatctttccgactctgtccacgattttggacgggttaagagctaaataatacgtaatagaaaaaaagatcaacgtgaaaacaaataaagataatctttccggaatgccgcttaaaaacggaactgcaccgatttcatatgaaacggttccggttctcggaatcgcgaaaagcggcccgattgataaataaagcacaacggtgaaaatagtgccgaataccgggtgagccttatcggcaagtcctttcgcgtctttgcccgttaatgcgatggcgataatacctaaaagcggcagtcctacgccggtcagtaagaaaccgcccatcgctttccagacattatgccccgccgcttgcccaagctccggcggatatatcatatttcctgccccgaaaaaaagtgcgaagagcatgaaaccgataataacggtatctttgacaggtagtgagtgtttcataaaagtcctcctaaatactatgttgaaatattctgtcaattaattgtcagataatataacaaaacgaacattacttattatatggcaatgtacagagaagtcaatactcgatttattgcgaatttctatttacttttgttatggtagcataaatatcatacgatgtaccgttttcataaaaggagtaaaaaaaatgatatatttagacaacagctcaacgaccgagccgtatgaagaggttttggaagtgtataaacagacgagcagccgttatttcggcaatccttcgtctctgcaccagttaggaactgagacggagcagctccttgaagcggccgctcagcaaataaaaagaaccttacgtttaaaaaattatgatattgtatttacatcaggcgcgactgaagcgaataacgctgcgttaaagggagcggcctgggcaaacatgagtaaaggaagacatatcattgcttcggcgattgagcatccttctgtgacggagacgcttgatcagctgacagagctgttcggctttgaagtcacatatcttccggccgatcaaaacggcttcgtttctttgaaagacgtcaaatcggctatcaggccggatacgataatcgtcagcgtcatgcatgtcaataacgaagtcggctccattcagcccgtaaaggaaatcggcgggtttttgaagcagcaccggaatattctgtttcatgttgatcatgtgcagggcattcataaagttcctctgtctatagaagaagcgggcattgacctttgcactgtttcagggcataagtttcacggcttaaaagggaccggagcgcttatcgtcaaaaaaggaacgcggctcattccgcttataacgggcggctcgcagcaaaaaggcgtccgggccggaacagaacatacggcaggcgccgtttcccttgcgaaagcgatcaatctttccgcgcgtgacatgaatgagcggctttcttccgtggaggctgccaagaatgcgctcatggaaaggctgagcggggcggacggggtcgtcatcaacactcccgccgaaaacagcgctccgcatatcattaatttttccgttccgggcgtgaaggccgaagtgctgctgcacatgcttgaggaaaaaggaatatatgtctccacaaccgcggcatgttcggcaagagagcataaaccgagccgtgttcttctgcaaatgaataaaggcgaacaggttgcatcaagcagcatcagagtcagcctgaacttcatgcatacggctgacatcacggagccgtttatggccgcgctggtgccggctgttcaaaaactaaaaaaaatgatgaggtagcatatgaattacgatcatattttaatccgttttggtgaaatatccacaaaaggaaaaaacagacgcagttttattgaaagattaaaacaaaatatccgcctggtattaaaggattataaaaaagtaaaatacttttcaaaccgggaccggatgtcaattacacttaatggagaaaacccggagggaatttgttccttattaaagaatatattcggcattcaaagtttcagtctcgcaattaaatgcgaaagcaagctggaagacattaaaaaaacggctttagccgcgatagaaggcgaatataaaccggggaatacgtttaaggtcgagaccaaacgggcttacaagcagtttgaattagatacgaatgcgatgaacgctgaaatcggcggccatattttgaaaaacacggatggattaaccgtcgatgtgaaaaatcccgatattccgcttcggattgaaatcagggaggaagcgacattcctgaccattcgtaacgaaaaaggcgccggaggccttcctgtcggttccgcgggtaaagcgatgctgatgctttccggcggttttgacagtccggtcgccggtttttacgcgatgaaacggggattatcagttgaagccgtacatttcttcagtccgccgtatacgagcgaacgggcaaagcagaaagtcatggatctcgcgggatgcctcgcgaagttcggcggcagtatgacgcttcatatcgtgccgtttacaaagacgcaggaactcatccaaaaacaaatcccggaaaactatacgatgacggcgacgcggcgtcttatgctgcaaatcgcggacagaatcagagaagaacgaaaagcgctcgcgatcattacgggggaaagcctcgggcaggtagcgagccagacgcttgaaagcatgtatgcgatcaatgccgtgacggcaacaccggttttgcgccctttaatcggaatggacaaaacagaaatcatcgagaaatcaaaagaaatcggcacttatgaaacaagcattcagccgtttgaggattgctgcaccatctttacgccgccaagtccgaaaacgcgtccgaaaaaagaaaaaatcgagcacttcgaaagcttcgttgattttgaaccgctgattgcagaggccgctgccggcatcgaaaccatcactgtttactcagagcaggaagctcacgataagtttgccggcctgttttaaaactgtatacaattaccaaagtttttttgaatgaagacatgtgttttatcacattctatactcacaaggaggtgatacacatgtcacaacaatcaaacagcggaaacagcaaccagcttttagtgccaggcgctgctcaagctatcgaccaaatgaagtatgaaatcgcttctgaattcggtgtaaaccttggaccggaaacaacttctcgcgccaacggttctgtcggtggagaaatcacaaaacgtcttgtctcttttgctcagcaaagcatgggcggaagcagccagcagcagttttaatcacaacttcacataatggctaagagagcggggaattccccgctcttttttcatgagtatagatagaaggctggaagcaatttatgcatatttttattgtaatggcctatgtttatgtataatggggaaagaaagtgaggagttgttcgtgttaaaacgagaagatttaatcgccccaaagaactataatcttgtaaatgaaatcgaaaagttcagccgttccaaagagaagaacgcgcttatttgggaagatcaaacaggcggcaagaaagtctggacgtatgaaaaattgatggaagaaacgaataaaatcggagcccgcctgaaaggtctcggatttgaaaaaggcgataagctgattgtcatggttccgagagtgcttgaagcgtatgccgtttatttagcgatcttaaaagcggggatggtcgtcattccttgctcggaaatgctgcgcgccaaagaccttgaataccggatcaaacacgccgaagtgaaaggcgctatcgtttatccttcatttataaacgcatttgacgaggtgaataccgagcagctggtgacattgtcaatcggtgaaaatgatgccggctggaaaaacctcttaacgattgaagcggacggaaacagttttcaaacagctgatacaacaagagaggacatggcgtttttgtcctatacttcaggcacgaccggccagcctaaaggcgttgtacatacacacggctgggcctttgcccatttaaaaacatcagccggtgcatggctggatatttccgaagacgatacagtgtgggccaccgcggcgcccggttggcagaaatgggtgtggagcccgctgctcgccgttctgggaagcggcgcgacaggattcatttatcacggcagattcaacgccaagacgtatttagagctgctggagcgccatcaagtaaatgtcttctgctgtaccccgacggaataccgcctgatggcaaaagtggaggagttggacaaatatgatctttctgcccttcacagcgcagtttctgcgggtgagccattaaaccgggaagtcattgacgtattccggaagcatttcggtattaaagtgagagacggatacggccaaacggagagcaccctgttagtcggcgtcctgaaggatatggatattaagccgggaagcatgggcaaaccgacccccggaaatcaagtagagattataaacgataagggcgaaatatgcgaaacaggcgaaacgggcgatatcgccgtgcatttgagcacaccggccttattcaaggaatattataaagatcccgaaagaacgaaaaagcagattcgcggagattattttcttacaggagaccgcgcgaaaaaagacgaggacggctacttttggtttgagagccgcaatgatgacattatcgtcagctccggatatacaatcggaccttttgaagtagaggacgcgctcgtgaagcatccggaagtgaaagaatgtgcagtcgtggcaagcccggatgaaatcagaggttcaatcgtaaaagcttatgtcgttttacaagacgatgaaaagcggagtgacgaacttgtcaaagaactgcaaaaccacgtaaaaacgattacggcgccttacaaatatccgagagagattgaatttgtcgaaagcctgccgaaaacggcgtccgcaaaaatcagacgtgtggaactgagacagcgtgaagaacggctgaaggctgataaaaaagcataatacaggataaagggtgagcggggatgaaagcgatttggcacggcggcaccatctatacaatgcttgacaagaatcatgtcactgaatccgtttataccgaagaaggcgtcgtcaggaagacgggcagctatcgggagctccaaggaacatacggttcgcctgatacggaggaaatcgatttacatggagctgtcatgttcccggggtttacggacagtcatatgcatttaatcggacacggggaaaaacagcttcgcctcgatttgtcgcagctgacgtcaaaagaagcgatcctgcgggccgcaaaagaagcagagcgtgaattggaagatggcgaatggctgatcggcgaaggctgggatgaaaacctgtttgaacggccggattacgtcacgaagcatgaccttgacccgctctttcccgaccgccccgtcctgctgaagcgggtatgccggcacgccgttgcggttaattcggccgcattgcgcgcggcggggattacaaacgaaacatctgatccaaacggcgggattatcgtccgggacggcaccggtccgacaggccttctgctggataaagcccaagagcttgtgacacaggccctgccgcccgtctcacttcactatgtcaaacgcgcgcttcaaacggcgattacggactgctggtcaaaaggcctgacaggcgggcattcagaagatctggcatactacggagacgcgtccgttcccgttgccgcgtacgagtctttaaccggcagcggcctttatccttttcgcgcccatctgctcgttcatcacgaagccgtcgacagctggagcgctctggataaatcgaccggaccttacctggaatacggagcgatgaaaatttttgctgacggcgcgctcggaggcagaaccgctctgttgaaaaagccttatcatgatgatccgtcagtttccggcgttcaggtgcacgatgacgagacccttgccgctcttgtttataaagcgagagagaaagggatggagatcgccgtgcacgcgattggcgaccttgcatttgaaaaggtgctcgatgttatcgaaagatacccggcaaagcccggacagctagacaggctcattcatgcgcaagtattagatgccggattgattgaaagagccgcccggctgccgatcggacttgatcttcagccgcattttgtggccagtgattttccgtgggtgattgaccggctcggagaagagcggatgaaaacggctttcgcctggaaaacactgctgtcaaaagggctgctgtgcgccggaggctcagacgccccgattgagccggccgatccgcttctgggcattcaatcggctgtgctccgtacaagcaagcagcatccggaaggtccggcctattatgaaaaagagtgcctgaccgtgtacgaagccattcagctttacacggagggaagcgcggccatcatccataaagaacatagccgcggacggatcgcccccggctatgatgccgactttaccgtactcagcggtgatccgttcgggacggatccgaaaaagcttcatgaattggaagctgtcaaaaccgtcgtcggcggccgtatcgtatatgaaaaagaggacaggcagtgatgcccgtcctctttttttatgataaaaatgatcgctttactttttcccagaaagagttgtctttcagtttcaccgttttgatttttttatcggatagtgtaatctcaacctttttgacattccgcgtgctgagcgcttcattatcaagcccgataatcggatgctcattgccgtcctggaccacctgcagtgtcagcttccggtctgagcttaaaataaacggagatccgagtgtacggtatgtgttgttgttcaacgacgccagttcggatacctgcatgcaggaaatcaaaggatcaacaacggcgcctgaaacagatttattgtaggcggtgctgcccgtcggggtggaaatgatcatcccgtctcctctgaacgtctcaaaatgaagatcatcaattaacacatccatcacaaacgttttaataatgcttgaacggatggaaacctcgtttaaacagtgaaaatgattgctgccgtccaccgttacatgaatgagcgggtattttctgacctcaagctgttccgcggtcatgctggccgccattttttcaggctcatcgctgtgaaaatcacagtacaaatgggctttcccttttttagcgatgccgacatacaggcagtcatcacggaatccggtttttctgacggcttgcagaaatgagccgtcgctgccgatgctggcgataattccggcatcctccgggtgagccgcaactgtaaaaccgtgcgattcagcaagctgcttcaaagagctgacttgttcttttgtttcgttgttttgtttgtgaaaaaaataaacattgcggcgaagatcggtcatatccccattcccctttgctgtcatatttacgtttttctcccagcaggtattgtgttaaaatacctgtggcaatagtgtaacatgtttcctgtttatccgttaagagaaagcgcttcatgaaaaaaatgaatctttttttacgggggaacgtacgaatattgacagaaaaggaggagaacaaatgaatgcaaaaagatggattgcgctcgtcatcgcgctcggcattttcggcgtatcggtcattgcaagtgtgaccgtcggggtgctgaagaatatcggagatacagggtctgactttgcatcactgacagatgacacagaggaagtgacgctggataagggcagccccggcagtaaaatcgccgtgcttgaagtggacggcacgattgaggataacggcgggtccgctggcctgctcagctcaggcgggtatgatcacagatcatttttaaaacaggttgagcgtgcgaaagaagataaaagcgtcaaaggaattgtactgaaaatcaattccccgggcggaggcgtgtacgaaagcgcggaaatacataaaaaactggaagaactaaagaaagaaacgaagaaaccgatttatgtgtccatgggctccatggcggcatcgggaggctactatatttcaacggccgccgataaaatctatgcttcaccggaaacgctcacgggttcactgggcgtcatcatggaaagcgtcaattattccaagctcgccgatgaactcggcatcaagtttgaaaccattaaaagcggcgcgcataaagacatcatgtccccgacccgcgacatgacgaaggaagaaagaaagatcatgcagacaatggtcaacgattcttatgaaggatttgtcaatgtcatttcaaaaggccggcacatgtcaaaagcggatgtgaaaaaaattgccgacggccgtgtttacgacggcagacaagcgaaaaaaatcggcctcgttgatgagctcggtttttacgatgatacgatcagcgcgatgaaaaaggaccataaaaatatgaaaaacgcttcagtcatcacatacgaggaaggattcggattaggctcgctcttttccatgagcgcagcgaaaatgtttaaaagcgaaattgattttctgaatatgaaagaactcatttcgcaatccggttcgccgcggatgatgtatctctatgcaaagtaggggggaagaaagaatggacgcgacttacgaaggctttcacggcaaagaagaggaagccgaacaacagagggcgcccgagcaggcatatgcgggcttttggatcaggttttgggcgtttcttcttgattggctggtggtctggggacttaaccatctcatcgtttcaccgattttcacgctgatgaagctcccggcaacaagcggaatgtttacaatctcagcttattccgtcacaaccctgatcgtctacctcgcctattttgtgttcatgacgaaatggtttcatcagacactcggcaagatggtcttcgggttaaaggtcacttctttgacgcccggaaagccgctgacttggagcaccgtcattttcagagaagcggtggggcgttatatcgataaaatctggattctctatatcgtcattgcgtttacgcccaaaaagcagggcattcacgatctgatcgccgacacaacggtgattcacgaagcgctgtaccgcaaataaaagcagtaaacccggaataaacgtccgggtttattttttttggttttggcgataatgctgctaaggaagtgaagcctatgggatatgccgcagcagctgttattctcattctcattttggtctggctgctcatgaggatgaaaatccatctgactttcgaatatcttcacgataaagataacgacaaactgacgtttaaactctcggccttatacgggctggtccgttttaaaaaaacgctgcccgtcattaaagtaaacagcgaagacgcgtctattgatgtcaaacaggacacgaaatcagaaatgaaaggtcagaaaaaagagaagaaaaaaatcacatatgaagatgtcaaacagagcattcacagaatagaaatgattctgcaccaagtcttgcagatgcgccaaatcgccgcctcatttcttgcgggagtccgtgttacgaagtttgaatgggtgacggttatcggaataaaggacgccgccgttacgggaatcgccgccggcggattgtgggccgtaaagggaggccttacggcgatgctgtatgatcatctgcgtttcatacataaaccggtgtgcgaagtcattccgtcttttcaagtgcctgcatccaagacgcatttgcagtgtatattcttttttcgttttggacatcttataggtgcagctttcaaattgctcaaatacgggcggaacggactttctatcatacgaaagaaacagccggttccggttgcttcaaagaatgattcatcagtttaaggaggagcgcatatggcagaccaccccattcaaggtttaatgaaaaccgctatggaaaatttaaaagaaatgattgacgtgaatacaatcatcggcgatcctgttgaaacgcctgacggcagcgtaatcttaacggtttcaaaggtcggattcggatttgcggcgggcggaagcgagtttggaggaaagccggctgaaaaaagaaccgatgatgatgaaagaaaagagcagaaactcccgttcggcggcggaagcggcggcggagtatccattacgccgattgcgtttctgattgtcggaacaaacggcgtgcgtatgcttcatttagacgaaaacacccatctgattgataaactgttagactccgcgcctcaaacgattgaacgcatccagcatatgtttaaaaagaatgaaaaaggccggaaccaaaaaagaacggatatcgatttataacagaaaagttaactgccgcccgcagttagctttttttacgatgcggcataacctttgcagtttgcataaaactcgactatgatagagctatacatagataaagggaggaatcagaatggctgaaattacatttaaaggcggagccgtgacgctgatcggacaagaagtgaaaccgggtgaccaagctcctgacttcacggttttgacaaacggattagaagagaagacattagcagatatgaaagggaaagtaacgatcatatccgttattccttccattgacacaggcgtatgtgacgcgcagacacgccgcttcaacgaagaagccgcaaaactcggtgatgtgaacgtttatacaatcagcgccgaccttccgtttgcacaagcgcgctggtgcggagcgaacggaattgataaagtggaaacattatcggatcataaagagatgtcatttggtgaagcattcggtgtttacatcaaagaacttcgtcttttggcgcgttccgtattcgtccttgatcaggacggaaaagtcgtttacgcggaatacgtaagcgaagcgacaaaccacccgaattatgaaaagcctatcgaagctgcaaaagcgttaatcaagtaaagagagaaaaagagctccgggtgctgccgcggagctcttttcatggcaaggaggaaacagcatgcaacacgatcatgtcggtcagatttatgaacttttagatgaagccgcccaagtgatagcagaaggccttgagatttcttatattgaggggcttgcggaggcgggagagatgtattttcttgaaacaacggaccagcttccgcttcaggaaaaacaaaccggcgagcttaaaagcctgcttgcgaaagcagacttcagaaaatgggagcatgaatggatccgcaaggcgttccagctcgccattttaaaaggactgaaagataagtcccatccgaacagacagatgacgcctgatacgatcggccttttcatcagttacctcgtgaataaatttacgggcggccgaaaaggcctgacgttgctggaccccgcctgcggcaccggaaatcttctgctgaccgcggcaaaccagctttctgacaaagcgggaaaaagcttcggcattgaaatcgacgatgtccttctgaagatcgcatatgcgcaggcgaatctgcaggaaaaagaaatggagctgttctgccaggacagtcttcagccgttatttatcgaaccggccgatgcggttatctgcgatttgccggtcggctactatcccaatgacgaaggcgctgaagcgtttgagctgaaagcggatgaaggccactcatttgcccaccacttatttattgagcagagcgtcaaacatacaaaaccgggcggatacttattttttatgattccgaaccatctgtttgacagcgcgcaaagcgataaactgaagcggttttttgcggaaaaagtatatatcaacgccctgcttcagctgccggctactatgtttaaagatgaagcgcaggcaaagagcattttaatcctgcagaaaaaaggcgaagacgcaaagccgccgaaacaagcgcttttggcgaatcttccttcttttgcgaaccagcaggcgatgcgggagatgatggcaaaattggatcagtggattcaaaaagaaaaataatggcgaaaaagcagtgtgagacgcaaaattccgcgctgcttttcgctttttaaaatgaatggaaatcagggcgaaaacacaaattaaggaaagaaaataacattccgtaaggccgtgccgtccatttggcacaaatgagatttatcagaaaatatcgacttcgtattgtaagcggtaccaatgtggatgttgacttgaaatgctgagttgacaatgtttaaatggaaaagtcagatattttttggaccgcagttatggtctgggaaaaaagaacgaacaaacgaagaagaattttgataggagcgtcatttatgtctaaaattattgcaattaacgcaggaagctcatctttaaaatttcagttattcgaaatgccttcagaaaaggtgctaacaaaaggtttagtagaacggatcggtatcgccgacagcgttttcactatctctgttaacggcgaaaaaaatacagaagtgacagatattccggatcatgcggttgcggtgaagatgctgcttcacaagctgactgaattcggtattataaaggatttaaacgaaattgacggaatcggccaccgtgtggttcacggcggagaaaaattcagcgattctgttttgcttacggatgaaacaatccgtgagattgaagagatttcagaacttgcgccgcttcataacccggctaacatcgtcggcattaaagcctttaaagaagtgcttccggatgtgcctgcggttgcagtgtttgatacggcgttccaccaaacgatgcctgagcaatcttacctgtacagccttccgtacgaatactacgagaaatacggcatccgcaaatacggtttccacggcacttctcataaatacgtgacacagcgcgcagctgagcttctcggccgcccgcttgaagatttgcgtctgatttcctgccacctcggtaacggcgcaagtatcgcggccgtagaaggcggaaaatccattgatacgtcaatgggcttcacaccgcttgcgggtgttgcgatgggaacacgttcaggaaacatcgaccctgcattgatcccgtacattatggaaaaaacggatcagacggcagatgaagtattaaatacattaaataaaaagagcggactgcttggcatatccggtttctcaagcgacctccgcgatatcgtagaagcttcaaaagaaggaaacgaaagagcggaaacggctcttgaagtgtttgcgagcagaatccataaatacatcggttcttacgctgcgagaatgagcggcgttgacgcgattattttcactgcgggtatcggtgaaaacagcgttgaagtcagagaacgcgtgcttcgcggcttagaattcatgggtgtatattgggatcctgcgctgaacaacgtgcgcggcgaggaagcgtttatcagctaccctcactctcctgtcaaagtcatcatcattccgactgacgaagaggtcatgatcgcacgtgacgttgtccgtcttgcacagtaatgatcgaaaaaagcacatcctttagggtgtgcttttttattgaatgccccagaatcaaacgttacgatatgtttaatacataaacgatgaggtgaagcaatgagtgtgcatgaacataaacaagaagccccgtcagccgtgcgctgcaaggtgataacagtcagcgacacgagaacgaaagaaaccgacaaaagcgggcgcgtcatgatggatttcatcagagaagcgggatttgaaacggtcgcttatgacattgtaaaagatgaaaaagatgaattgcagaaagccgttttatccggctgtatggatgaatatacagatgcggtgctgttaaacggagggacgggcattgccgaaagggatgtcacaattgaagcggtcacgccgctgttttcaaaagaactcccggggttcggcgagctgttccgcatgctgagctatacggaggacatcggctccgccgccattttgtccagagcggcagcgggtgtgatccgaaataccgcagtcttctgcacgcccggctcctcaggcgccgtaaagcttgcaatgagtaaactgattattcctgaactgcctcatgtgctccgggaaatccgaaaagatttataaatgtataaaaaggctctgctccgctcaaaaaattgggtggggttttttttataaaaggcttgaaaaaacagaatttacttgttacagtgtatacatacaaaatgcatttttattaattaaaactaatttttatacaaagggagcttttaacatggcagaacaaaaaaaggttgtattggcatactcaggaggtcttgatacttctgtagcgataaaatggctgcaagaacagggatacgatgttgttgcctgctgcttagatgttggggaaggaaaggatttggcattcgttcagcaaaaagcgctggaagttggcgccgtaaattcctatgtgattgatgcgaaagaagaattcgcccgggagtacgcgctcatttctatgcaggcccatacaatgtatgaaggcaagtatccactcgtatctgcactatcccgtccgttaatcgcgaaaaaactcgtggaagtggcggaaaaggaaaacgcggtggccgtagcgcacggctgcacgggaaaaggaaacgatcaggttcgtttcgaagtatccattaaatcattaaatcctgatctggaggtcattgctccggtccgtgagtggcaatggtcgcgtgaagaagaaattgaatacgccgcaagccgcggcataccgattccgatcaatcttgacagcccgtattccatcgaccagaacctatggggacgcgccaatgaatgcggtatattagaagatccgtgggcggcgccgcctgaaggggcatatgacctgacagcatctcttgaaaacacgccggacgttccggaaatcatcgaaatcgcatttgaagccggtgttccggtttcaatcgacggcgtaacctacccgctcgctgatttaattctcaagctgaacgagactgccggaaaacacggcatcggccggattgaccatgtggaaaaccgcctggtcggcattaagtcccgtgaagtttatgagtgcccgggcgccatgactttgattacggctcacaaagagcttgaggatctgactttagtgaaagaagtggcccatttcaaaccggcaattgaacaaaaactgtctgaaatcatctataacggtttatggttctcgccgttaaaagacgcgctgcttgcattcctgaaagaaacccaaaagcatgtcaccggcgttgtgcgcgtcaagctgtttaaaggccatgccattgtagaaggacgtaagtcggaatattctctctacgacgaaaaacttgcgacatatacaaaagacgatgcgtttgaccatcacgcggcaatcggtttcattgagctttgggggctgccgacaaaagtaaacagcattgtgaaaaagaaggagcagattgaagcatgaagaagctttggggaggccgttttcaaaaaacaccggaaaagtgggtcgatgagttcggcgcatccatcacattcgaccaaaacttagtcaaagaggatattacagggtctctcgctcatgcggcaatgctgaaaaaatgcggcattctgacggaagaagaagaaggtgccatccgtcaagggctgcagactctcctgcaaaaagcagaggaaggagcgcttgaattctctgttgattatgaagatattcatttgaacattgaaaaaatgctgattgaagaaatcggaccgctaggcggcaaactccataccggaagaagccggaacgaccaggtggcgactgacatgcatctatatttgaaagatcatgtctcgcatatcatcgtgctgattgaacagttccaaaaagcgctgatcgaaaaagcggaggccaatgtcgagaccattctgccggggtacactcatttgcagcgggcccagccgatttctttcgcccaccatctgcttgcttatttttggatgcttgaacgggataaagagcgttttcgggatgctatgaagcggattaacatatcgccgctcggatgcggggcgcttgccggaactacgtttccgatagaccgtaactattcggcggagctgctcggttttgactccatttacgagaacagtcttgacggagtcagtgacagagattttattctcgagtttttaagcggcagcagcatgctgatgatgcacctttcacgtttgtcagaagaaatcattctatggtgctcgcaggaattcagattcattgaactggatgatacgtacgcgacgggaagcagcatgatgccgcagaagaaaaaccccgacatggcggagctgatccgcggtaaaaccggacgcgtatacggtgatatgatgggtcttttcacaattatgaaaggactcccgctcgcttacaacaaagacctgcaggaggataaagaaggcatgtttgacacagtaaaaaccgttgaaggaagccttcagattttcacgggcatgattgaaacgatgaaagtaaacaaagacatcatgaaacaagcgacaaaacaagatttttcaaacgcgacggaacttgccgattatttagctaaaaaaggcatgccgttcagagaagcgcatgaagtggtcggcaagcttgtgtacagctgtattgaaaaaggaatctatttaagtgacatggcatttgaagaattccttcaagccagcagtctctttgaagaagatatctataccgtgctcgatccgcatcatgcggttgaaaaaagaatgagcgccggcggaacgggttttcagcaggtagaacaggcgctcgtaaaagcaaaagcctgcgccggcatttaatttgctgaaatttccttcatattttcccgtcatatcagacaccctacatctataaaagatgggaggtaaaaggaatgcgcaaagaacaagaccgttacatctatgatgaaaaagaaagtgaagaaacggccaggcttatctcagaggcataccaaagcggttatgtcggcatggaggaagcctctgctccttcagaaaattaagctgtctgtaaagacggcttttttttcgtgcggacgaagtgcaaaaaagtgatattgccgtttgtttatagtaaagtagagggagaaacgtcttgattttattgaagcggctacgttgcctggggagggtattcaatgtgcgacatgctctaatcactgccggtacaaagggattgggccgaaaagtgactgaaatgcttctggaaaaaggcttttctgtcacagtgaattacagacaggacgaagaagcggtcgcttgtctgaaggcggattatcccgggtgccatgacagattgcaattcgttaagggcgatgtaacccggaaagaagatctcatgcggatcgccgatgcagcccttcagcggtttggaaggattgacatactgattaacaatgccgggccgtacatatttgagcgcaaaaagcttgccgattactccgatgacgaatggtatggcatgcttgaagggaatttaagcgccgttttccatctgtttaaagcggttatcccggtcatgagacagcagcgcttcggccggattattacatacggttttcaaggagcggaccatgcccccggctggcttcaccgttccgctttcggagcggctaaagtcggattggcttcgttaacgaaaaccattgcgattgaagaagccgaatcaggcattacagccaatatggtctgcccgggtgatattgtaggagatatgaaagaagcgtctatagaggaagcaagacggaaaatcggcaaagaaaagacgccgatcggcaggtccggaaccggagaggatattgcgagaatcatcgcgtttttatgtgaagaagattccgatcttgtaaccggaacggtcattgaagcaacaggcgggctgaatgtgattaacaggcatcaatccctgtaagttttttcgtttgtcaaaaagggaacttgataaatattaattttttatgaggtgaaaacgatgaaagtgacttatcacggacattctgtcattcaagtggaaacgaaaacccataacattatttttgatccgtttctgaccggaaacagtctgacaaatttgaaaccggaagaagtgaaagcggatgtcatcctgcttactcacggacacaatgaccatgtcggagatacagagcagatcgccaaacaaaacgatgcgctcgtcattgcgccgaacgagctggccgtttatctcggctttaaaggtttaaaggtccacccgatgcatatcggcggggcgcaccaatttgatttcggcaaagtaaaactgacacaggcgttccacggatcggcggtcactgatgaagaaaacaaaaccatcacatacaccgggatgccggccgggattttattaacgattgacggcaaaacgattttccacgccggcgatacggcgctgttctcagatatgaaactgatcggggaactgaatcacattgacctggcgtttctgccgatcggtgataacttcaccatggggcctgaagatgcgaaactcgcggctgaatggctgagagcgaaacaggtcgttcccgttcattacaatacattccccgtcattgaacaggaccctgacgctttcgctgaaagtctgcccggaggcgtcggcaaagtcatggcggtcggcgagaccattgagcttgcctgacatatgtgtcaaagaccttctgaatcaagcattcagaaggtcttttttgtggtgccgccttttttcgggcgtctcattgcgaatgaatcccccgtacccttataataaaagcagaagactgtccttagaggtgaaacgcttggcaacaaagcatgaacaaatcctatcatacatagattcgcttcctgtcggtgaaaaaatttcggtcagaagaattgcgaaagaaatgaaagtcagtgaaggaacggcttacagagccattaaggaagccgaaaacaaaggattcgtttccactattgaacgtgtggggaccatccggattgaacagaagaaaaaagaaaatattgaaaagctgacatacgctgaggtcgtcaatgtgatcgacggccaggtgctcggcggaaaagcaggtctgcataaaacgttgaataagtttgtgatcggggcgatggagcttgacgcgatgatgcgttatacggcggcggggaacctgttaatcgtcgggaaccgaatcaacgcccaccgccaggcgcttgaagcgggcgcggccgttttggtaacaggagggtttaataccgacgacagcattatcgagctggccgatatgcttgagcttccgattctctccacgagctacgatacctttacggtagccgcgatgatcaaccgggcgatctatgatcagctcataaaaaaagagattgtgctcgtggaagatattttgacgcccgcagatcggacagtgacgctgttccctaaggataaactggagaaatggtacgaaaagaactatgaaaccggacacggccgctttccggttatcgatcagcagatgaaaatccacggaatcctcacgccgaaagatatcgcggggcatgaccggtcagttcccattgaaaaagtaatgaccaaaaaccctgtcacggtgatcggaaaaacatctgtcgcctcagcggctcaaatgatggtttgggaaggaattgaagtgcttccggtgacagacgggcatcacaaactgatcggaatgatcagccgccaggatgtcttaaaagcgcttcaaatggttcaaaagcagcctcaggtcggggaaaagctggatgatattgtttcaaggggatttaaagaagaggaagataacaaaacgccggccgtttatcaatatgaagtcacgccgcaaatgaccaatcagctcggcacgatttcttacggggtgtttacaacgattttaacccaggccgccagccgatttttacgctcccgcaaacgcggcgagctggtcattgaaagcattacgattttcttcctgaagcccgtacagatggagtcggtcatagaagtgaaaccgcgcattttagaggcgggccggaaattcgggaaaatggaagtggaagtgtcaagccaaagcggcatcgtttcaaaagcgatgctcatggtgcagctgatggagagaagttaagggacacacccgggtcccttggcattcattatgcgtggtccctctccgcttcctttgcatggatgggctcataatgcttataggctttatacccggcccatgcgctgcctgctccgattaaaatgaagacgccgccgatgaccagggtcaggacggagtggaacagaatcatttggtttactccgtacaaaagcaccagcgcgcctaatgccatacttgatttagccgaaaaacattccttctccagcgcccgtttcgtctggattccttttactttgtaatacacgtaaaagcaggcagaaagcccgatgagaaaaacaaaaaccagcataaatgaaatcctccattatatgagtttgcaaaaccgtttataccgttgctgaaagattttccttttccatggataaagagtatgattaaatgaataaaaacgaaaaggagaaaacgatgaaatccgaactgatcagaaccatatcattatatgacaccattatcttacatagacatgtgaggcctgacccggatgcctacggttcacagtgcggccttacagaaatcctgcgggaaacgtatcccgaaaaaaatatttttgccgtcggacagcctgaaccgtccttgtcttttttatattccctcgatgaggtggatgacgaaacctataaagatgctcttgtcatcgtgtgcgacaccgcaaaccaaggcagggtcgacgatcagcgctaccattccggcgcaaagctcatgaaaatagaccaccatccaaatgaagatccgtatggcgatctgttatgggtcgatacgaatgcaagctccgtaagcgaaatgatctatgagctgtacctggaaggaaagcagcacggctggaaactgaatacgaaagcagctgagctgatctacgctggtatcgtcggtgatacggggcgcttcttattcccgaacaccacaaaaaagacattaaaatacgcgggagagctcattgagttcccattttcatcgtcagagctgttcaatcaattgtatgaaacaaaattaaatgtggtgaagcttaacggctttatttatcaaaatgtgtcactgtctgaaaacggcgtcgcttccgttttcattaaaaaagacattttggagacatatggaaccaccgcttctgaagcgtcgcagcttgtcggaacactcggaaatatttcgggtatccgcgcttgggtgtttttcgtagaagaagacgatcaaatcagagtccggttccgttcaaaaggtccggtcatcaacggaattgcccggaaatacaatggcggcggacatccgcttgcggccggcgcatccatcttcagctgggatgaaaccgatcagattcttgctgatctggaagaggtatgtaacgaacacaagtagaggggagaccctctttcttagtgttcatctgtcacggggatgaaccagcagccgaattcagtcaggtcttcgtagacgcggagattacagatttggagttctttttttatgagggaagcgagtgtgtctgtttctgcatatgcggaatagccttgtctgattcgggctgcatgatcttttgccaagcggcgttcactaaaaacctccattttcccttcctcccttcagaatcgttgaaaatgtctcatctacagtttataaaaaagcggagaaaaaagcgacagatctatggaaaatttttaaaaataacataattacgtcgcaaaagaaatatgaatttcgacagacaatctcgtataaatcgtcagttcctttacttcagctttaaattccttctcatttatggtgtatattttgttttcaattgtccgttttaaaagctcctttgttttatacacgctttcaatatcctttgtgatgacttcagaaatattatctttcacctgttcctcaaatttcatcttgtcaggctgggcgattctgtatttttcccaattaatcagcttcacatcaacactttggatgagaagtctttgcttattatcctcatttaatttatgaagatctttctgatagatggagatttggttttttaaatcccgcgcgtgctcccgctgcttttcaattaacgtcacctgttcttcctgaaacgttccgtatgtaaacagaaagaacagccagctgatgatggctccgcacatcattcccgcaaaaaaacgctgccatcccggttttttataatactcgggaattctcatgatgacatattctcctgggtcagccatgaaataatcagccagccggtctgcgcgccgcccattgctgaaataattaaaagaagctgtttgaagatgtcgcgcgtgttgccttcaaacagcccccgctcgaaactgtataccgcgtcaaatgttcccccgatggccgcgacaagcgcccagatcttcagcctgttcgccaattttgtgatcgccgtcagcggaggctcgcctgataaataagctccgaggccgccgatcagcgcgccgccgagcaacacaccgagggcgataaaataactgctgatgaaattcgccataaagccggcttcctgatccatatatacaccacctcacttttctatcatattgagcgaaacggacaagtatgatgatgagtcaaaaaagaacatttgtttcttaagaaaacccgtcttataatgtagaaagacaaaatgaacgtatgggaaaggagtggcggcattgtcttttgttcacctgcaagtacatagcggctacagcctgttaaacagcgccgcttctgtaaaagagcttgttacacaagcgaaggaactcggatattcatcattggcgctgacggacgaaaatgtgatgtacggcgccattgagttttataaagcatgcaaatcaaacggaattaagccgattatcggtctgacggcttctatatacacggacgatacggagcttgaagcacacccgctcattcttttagcggagacaaacaccggttatcagaacctggtgaaaatctcaagtgcgctgcaatccatggcaaagggcggcatgaagcgaaaatggatgaagagctatcatgaggggctgatcgccattacgcccggtgaaaacgggtacattgaaagcctgcttcaagccgggaagtttgaagaagcggtccgggctgccgaaggattccgggagctgttcggagacggccgtttttatttagggtaccagccgtttaaaggacatgagacgttatcagaagagattctccgcctgtcagccgagacggaaatcgctgtctgcgctgcgggagatgtccgctatatcaagaaagaagatcaagatgcgtaccgctgtctgtgcgctattaaagccggagagaaatgggaggatcagagcgggaatctgccggacttatacttgaggacgcctgaagaaatggcagagctttacacgcggcatccggaagcgattgaagcggccgcccgtatcgcccggcaatgccgggtcgatgtaagcctcggacagacacagcttccgtcttttccggcgccggacggcaaatcagccgatgactatttggcggagatctgtcatgaggggctgcgtctccgtttcggcactcctgatgagcgggctgtccgccggcttgaatatgagctggacgtcatcaggcgcatgaaattcagtgattattttctcatcgtatgggactttatgaagtacgcgcatgaaaagggcattgtgacaggcccgggaagggggtccgcggcaggctcgcttgtcgcttactcgcttttcattaccgacgtggatccgcttaaacattctctgctgtttgagagatttcttaatcccgagcggatcagcatgccggatattgatatcgatttccctgatacgagaagggatgaggtcattcagtatgtacaaaataagtacggggccatgcacgtcgcccagattatcaccttcgggacattggccgcaaaggcggcgttaagggataccgggagagtgttcggaatcagcccgaaagaagccgaccagcttgcccgcctgatcccgtcgaaaccgggaatgacgcttgaggaggcgaggcggcagtccgctcagctgaacaggcggctgtccgaatccgccgttcttcataaagtgtttcagatcgcaaggaaaatcgaaggtcttccgagacacacgtcaacacacgcggccggggtcgttctcagtaaagagccgctttcggaagttgtccctcttcaagaagggcatgacggcgtgtatttaacgcagtatgcgatggatcacctggaagatctcggtcttttgaaaatggactttttaggtttgcgcaacctgacgcttattgaatccattaaaacgatgattgaaaaagagacgaatacgaaaattgatttttccgagatttcttatcaggatgaaaaaacgttctcgctattgtcaaacggtgatacgacgggtattttccagctggaatcatcaggaatgagaaacgtgctgaagcgcctgaagccgtcaagactggaagacattgtcgcggttaacgcgctttacaggccgggaccgatggaaaatattccgttatttatcgatcggaagcacggacgggcgcgtgtggaagtgccgcacgaggacgtaagaaatattctcagtgacacttacggcgtcatcgtctatcaagaacagataatgatgatcgcctcgcgcatggcagggttttcattaggtgaagcggatctgctcagacgggctgtcagcaaaaagcaaaaggacattctggacagagagcgaagccattttgttgaagggtgcttaaaaaaggagtattctgtagtcactgcaaacgaggtctacgatctgattgtaaaattcgctaactacggattcaacagaagccatgctgtcgcatacagcatgatcggctatcagctcgcctatttaaaggcgcattatccgctatattttatgtgcgggctgttgacgagcgtcatcggcaatgaggacaaaatatcgcaatatctgcatgaagcgaaggggagcgggattcaagtccttccgccgtcaataaacaaaagcggttttccgtttgcgccggaaaacggagccgtcagatacagtttgcgggccgttaaaaacgtaggcgtctcggcagtgaaagatatttataaagcaagaacacataaaccgttcgaggatcttttcgatttctgctttcgcgtacctgcaaaaagcgtgaatcggaaaaccatcgaagcccttatattttctggcgccatggacgaattcaatcaaaatcgcgccgccttgctggcctccgttgatgtggctttagagcacgctgaactttttcgtgcagacgatgaccaaatgggattgtttttggaagaatcgttttccattaagccaaaatatgtagaggctgaggaatttccgctcgtggacaagcttcggttcgaaaaagaagctctcggtgtttatttctcaagccatcctttgtctgctttcagggatctcctgaaaaaacggggggcgcaaacgatcacagcagcgcggcagatgccgaagggacagctgtcaatcggcgctttgctcgcgggcattaaaacgattcggacaaagacaggtcagcatatggcgtttctcacattaagcgatgaaacgggagaaatggaagccgtcgtgtttcctgaccaatatagaaggctgtctccgctgttaaaagaaggcgcgcttttattcgccgccggaaaaatggaagagcgtcaggagaagacacaattcatcatgtcatccgcctctcttcttgaacagacggaggcagacagagcgccgtctgtttacatcaaaatcgaaggcagccggcacaatcaggagtttttggaaaagatgaagcgtattttactggagcataaaggggaaaccggcgtttatctatattatgaaaaagacaagcagacgatcaggctgccggatacttttcatattgaggcggaccatcaggcgttataccgtttaaaagagctgctgggccgcgaaaacgtcgtgttaaaatagtggtaacaataatcgttttgttatacaattgaaacaattgtgctatcttatttaaagattctgaaatttttcacctccagcgattgtaccagtctatgcggcagaatatgtaacaaagtacttaaaaggagtgtttagaatgtcattaagagaagaagcgttacatttacacaaagtaaatcaaggaaagctggaatcaaaagcaaaggtagaagtcagaaacgcggacgacttaagccttgcctactctcccggagtagctgagccttgtaaagagatttatgacgataaaaataaagtatatgattatacaatgaaggggaacatggtagcagtcgtaacagacggatcagccgttctcggtctcggtaatatcgggcctgaagcttcacttccggtcatggaagggaaagcggtgctgtttaaaagtttcgcgggcgtggatgcattcccgatcgcgcttgacacaaacgatgtggacaaaatcattgacactgtgaagctgcttgaaccgacattcggaggtgtcaaccttgaagatattgcggcgccgaactgcttcattatcgaagagcgcctgaaaaaagaaacaaacattccggttttccacgatgatcagcacggcactgccatcgtaaccgttgccggacttgtaaacgcgctgaaattatcaggaaaatccatgtcatccattaaagttgtggcaaacggagcgggagcggcaggcatcgcgatcattaagcttctttaccatttcggcgtacgcgacatcgtgatgtgcgactctaaaggagcgatttacgaagggcgtccggccggcatgaacgcggtgaaaaacgaagtggccaagtttacaaaccaagaccgcaacgatggctcgctgcaggatgtcattaaagatgcagacgtctttatcggcgtatcagtcgaaggcgcgctgacgaaagaaatggtggagagcatggcgaaagatccgattatcttcgcaatggccaacccgaatccggaaatcatgcctgaagacgcgcgcgcagccggcgctagcgtaatcggaacaggccgttctgatttcccgaaccaggttaacaacgtgctggcattccctggaattttccgcggggcgcttgacgttcgcgcgactcacatcaacgaagaaatgaaaattgctgcggttgaagcgattgcttcccttgtttcagaggaagaattaagcgctgattatgtcatcccggctccgtttgacaaacgcgtggctcctgccgttgcgaaagctgttgcgaaagcagcgatggaaacgggcgtcgccagaattacggtcgatcctgaagaagtggctgaaaaaacaagacagctcacagtcatcggggaataataacacaaaaatgaaatggcagcgcgttggaaaaaacaacgcgctgctgttcaatatacggactgctggcatttttttaagggcaggtcttaaaaaaatttcagcagaatccttatttcttttgaaaacgctgacagataaggctgaacaacgctttttacggtatgaaatccgtccgtttccgtctgttttgcagcaaaaaatgtcgaatggaggatgacaccgtttgacaaaaaaagtacaatagtttcggtaaagttattattaagtctatctaatcggaagacatgcagtgaagagaacccttcacaaaagggaggtaatcatttgttaaaggatatattcacaaaaaagaaaaaatatgcttccgtgccgtctgagcaggcaaaacatgatgttccggaaggcattatgacaaagtgccccaaatgtaaaaaaatcatgctcacaaaagagttagataaaaacctgcgcgtctgcatgaactgcgggcaccatttcccgatgaatgcaaagcagcgcattgaaagcctcctggatgaagattcattcgaagaattcaaccagggaatgatatctgaaaacccgctcggtttcccggaatacttagaaaaaatcgaaaaagaccgtgagaaaacatcgctgaatgaagcggtggttaccggaaaaggaaccatcagcggattccctgccgtgatcgcgatcatggattcaacattccgaatgggcagcatgggttcggttgtcggcgaaaaaatcacgcttgcaattgaaaaagcaaaagaggaaaaagtcccgtttatcatctttaccgcttccggcggcgcacgtatgcaggaaggggtcttaagtcttatgcaaatggcaaagacaagctctgcattaaaactgttcagtgaggagcagggactgattatttctgtcatgacccacccgacgacaggcggcgtatcggccagtttcgcgtctctcggtgattataatttcgctgaaccgggcgccttgatcggatttgcaggaagacgtattattgaacagacgatcggggaaaaactgccggaagatttccagacggcggaatttttattaaagcacggccagcttgatgcggtgattcaccgaaacgacatgaaagagaaactcgcatttctgctggacatgcaccaaacaggaggtgagcatgagtggctgcaagattagaatttgaaaaaccggtgattgaactgcagacgaaaattgccgaactgaaaaaattcacccaagattcggagatggatttaagcgctgaaatcgcaaggcttgaagaccggctcagcaagctccaggatgagatttataaaaatctgaagccgtgggacagagtgcagatcgcacgccttcccgaccggccgacgacgcttgattacattcaatacctgtttaccgacttttttgagtgtcacggagacagaacatacggagatgatgctgcgattgtcggcggagtcgccaaatatcacggcatgccggtcaccgtcatcggacatcagcgcggaaaagacacgaaagaaaaccttgtccgcaatttcgggatgcctcaccctgagggctaccgcaaagcgcttcgtctcatgaagcaggcggataagttcaaccgcccgattatctgcttcatcgacacgaaaggagcgtacccgggtaaagcggcggaggaacggggacaaagtgaagccatcgccaagaacctgttcgagatggccggcctgacagtgcctgtcgtttgtatcgtcatcggggaaggcggcagcggaggcgcgcttgcgttaggtgtgggcaaccgcatgctgatgcttgagaactcgacgtattccgttatttctcctgaaggagccgcgtccattttgtggaaagactccagccttgcgaaaaaagcggccgaaaccatgaagattactgcgcccgatttattagaattaggaattattgatgatatgattaaagaagtgaagggcggagctcaccatgatatcaagcagcaggcgggctacattgacggtattcttaaagaaacgttaaaatctcttcttcgattgaacgccgaagagttgatctcacagcgctatgaaaaatataaagcaatcgggaaagtttcggttgaggatcaatatatcggggtaaactgaatagacgtgaagcctatggctcacgtttattttttgtgatttttgtgatattccttaaattttatttaaaaacaatttatttaattgtataataggtaaggtttcatgggagctcaggcgtcccttttcattgttttagggcaatgatcatgatatgtttaacatatatagttgctgaggtgaataggaaatgaagcgtataggagttttaacgagcggcggggattccccgggtatgaacgctgcggtgcgcgcggttgtgcggaaagctatctaccacgacgtcgaagtgtacggaatttataacggttattcaggattaatcagcggaaaaatagaaaaactggagctgggttcggtcggtgacatcatccaccgcggcggaacaaagctgtatacggccagatgtcctgaattcaaaacagttgaaggccgtgaaaaaggaatcgaaaatttaaagaaactcggcattgaaggtcttgtcgtcatcggcggagacggttcatacatgggtgcgaaaaaattaacggaacacgggtttccgtgtgtaggtgtaccgggtacgatagataatgacatcccgggaactgattttacgatcggatttgatacggcgttaaacaccgtaattgatgcgattgataaaatccgtgacaccgctacgtctcatgagcgtacatacgttattgaagtgatggggcgccatgcgggcgacattgctttatgggcaggtcttgcaggcggagcggaatcaatcttaattcctgaagcggactacgatatggaggaaattatcggccgtttgaagagagggcacgaccgcggcaaaaaacacagtatcatcatcgttgcagaaggggtaggcagcggggttgaattcggaaaacgcatcgaagaagaaacgaaccttgaaacacgggtatccgttttagggcacatccagcgcggcggatctccaagcgcttctgaccgggttcttgcaagccgcctcggcgcttacgcggttgagcttctgcttaaaggaaaaggcggacgctgcgtaggtatacaaaacaacaagcttgtagaccatgatattatagaaattttagaatcaaaacatactgttgaaccaaacatgtatcagctttcaaaagaactgtctatttaaggcggaagaagctgaagatttcagaaggaagtgaacgagttgaaaaaaacaaaaatcgtttgtacaatcggtccggccagtgaaagtgtagaaatgctgacaaaattgatggaagcgggtatgaacgttgctcgtctgaatttttcacacggtgatttcgaagagcacggcgcaagaatcaaaaacatcagagaagccagcaaaaagctcggcaaaaacgtggggattctcctcgatacgaaaggtccggaaatccgcacgcacgatatggaaaacggcgcgcttgagcttcaggcgggaaatgaaattatcgtttctacgaaacaggtgctgggaacgcttgaaaaattctcagtttcttatgaaggcctggcagacgacgtgtcagcagggtctatcatcctgctggatgacggtttaatcggattggaagtgctggaatcaaatccggaaaaacacgaaatcaaaacaaaaatcttaaacagcggcacgctgaaaaataaaaaaggcgtaaacgttcccggcgtcagcgtcaaccttcccggaattactgaaaaagacgccaaagacatcatattcggtatcgagcaaggcgttgatttcatcgctgcgtcatttgtacgccgttctacggatgtcctggaaatccgcgaactgcttgaagagcataacgcgtctgacattcaaatcattcctaagatcgagaaccaggaaggcgtggacaacctggatgcgatcctggaagtatctgacggcctaatggtagcgcgcggagacctcggcgtagagattccggccgaagaagtgccgctcgtgcaaaaagaaatgatcaaaaaatgcaacgcgctgggcaaaccggttattactgcgacacaaatgctagacagcatgcagcgcaaccctcgtccgacacgtgctgaagcaagtgacgttgccaacgccattttcgacggcacagatgcgatcatgctttccggtgagacggctgcgggacaatatcctgttgaggcggttcaaacaatgtttaacatcgccacacgcacggaagaatctctgaactataaagaaattctgtctaaacgcagagatcaggtcggcatgacgattactgatgcgatcggccaatcagttgcgcacacggcgatcaatctgagtgcggcagctatcgtgacgcctacagaaagcggccatacggcgcgtatgatcgcgaaataccgtccgcaggctccgattgtagccgttacggttaatgagtctgtatcacgcaaactcggccttgtattcggtgtattcccgtcaagcggccaaaacgcgaattctacagatgaaatgcttgaagacgcggttcaaaaatcacttgacagcggcatcgtgaaacgcggtgatctgattgtcattacagcaggttctgtcggtgaatcaggcacgacgaatctgatgaaagtccacactgtcggcagcattatcgcgaaagggcaaggcatcggacgcaaatctgcattcggtccggtcgttgttgcaaaaaatgcgaaagaagctgaacaaaaaatgacagacggcgcagtattggttgcttcaagcactgaccgcgacatgatcgcttcacttgaaaaagcatcagcgctcatcactgaagaaggcggtctgacaagccatgcagccgttgtcggtttaagcttgggcattccggttatcgtcggccttgagaacgcaacttcagttttaacagaaggacaggttatcacagttgacgctgcccgcggcgctgtgtatgaaggccgcgcaagcgttctttaaacagctttaaaaaagagaggggggttctcccttctcttttgtctttaggttgattttcctattcccatgcgggcggtgacgcgcttttagaagggcaggagggcagaaaaatgagagtgttattcttactgtttatcgtatgtccggcaattgaaatcggtttgtttctgctggcgggaaaatggctcggtatttttccgaccttccttctcatcattttgacaggcgtgttaggcgctttggtggcaaaaagacagggaaccgatgtgtatcatcgggtgatgcgcgacctgcagcacggcaaaatgccgggggaagcgcttcttgacggaatatgcgtctttttcggaggcctgcttttgatgcttccgggttttctgtccgatattgcaggggcctgtcttctgattccgttcactcggaaccgcatgaagccgtttttgttcaaatggctgagagggatgtcaaaaaacaagcggatcattatcaaataaaaaacggcagccttcttacagggctgctgtttttatttggattgaacagtaatataggcccatatttcttttagagcgcccgttgtgataaaggcctgaatgaaaacgagcagcgcgggcccggcagccagtcctaaaattccgaacaatttaaagccggcaaacagggcgattaaggtcgcaagcggatcaagtccgattgacttgcttaaaattttcggctccgtcagctggcgctgaatgagaaccacaatatataaaacaccgagaccgatcgcttgaggaagctgaccggcaatggccaaatacataatccagggaacaaagaccgacccggcgccgagatacgggagcagatcaaccaggccgataaaaaaggcgatggttgccgcatgctcaatccctaaaagaaaaagtccgataaagacaatgatcatcgtgaaaagtatgagcacggcctgcgccttaatgaaacctgccatcgcttttttcagctctcccgatacggccttggcgtttgccgaaacccgttccggaaaaatggaataaagcagcgccttcagcttatgccagtcctttgtcataaaaaaagtcgccagcattgcgaaaatgaagacggcagctgtattgggaaggaaggcaatccatttcggcaccagctccaaaagatgtgaaagcatgagccccgcatttttagcggctgtatcaccgagggtctgaatatgcgtcacgatggaagcctgctgattggtttccagcccgttaaataggacggtcagctcgtggtacaatggctgaatgcgggaagtgaacagctcttcgcaatacgtcataaaggcgctgatatggggagggagcgttttggccagataggcggttcccgaaatgatttccgcaacgagaaatgttgccgcgccgagaagaataagcaaaaagaagaccaggacaatgactgtattgactgaccggggcagccccgtcagtttgtccagccagtcaacaacgggaatgatcgctgatgacagaataagggcgatcagaaacggataagttaacggaaatgaggcgtaaccggccgctaaagcgccgccggccgcagcgagtacaaacagcgcgcggaaaaaaacagttgcatagtgcggattcacatcgatcctcctctcggtcggcacgtcctattacattagtttattcgtcaaaaaaaaggatatgattacagatatgatgaaagagggtgctttcaggatgtttacacaggcgaatttatttttactattattgctggccatcgcattggtagccaaaaatcagtcattgctttttgccgtcggctttctcattgtgataaaagctgtcggtcttgatcagaaactatttccggttattcagtcaaaaggcatcaactggggggtcaccgtcattacaatcgccgttttagtgccgattgccacaggtgatatcggttttaaacagctcggagaagcgatgaaatcatattatgcgtggatcgctctcggtgccgggatcgcggttgccttaatcgccaaaaacggtctcaccttattggaaaacgaccctcatattacaacggcgctggtcatcggcacgatacttgccgtcgcgcttttcggaggcgtcgccgtcggcccgttaatcggcgccggaatcgcctacttggccatgcaaatcgttaaaatattcacttcataaagtaaaaaagcggcgtaaagctgcttttttttgcgggtgaaaataagagtttgcagggcattttgtagttcagacaaatgccatttgcattattccgaggaatgaagtggcttaccatgtaacaaagaacttcggaatcgccggcgcatattgtgcgatgacagcggatgcagtaaggcggttccaattgatgaatggattaaaagctgatggaatttatgcacttgaaccaaatcaaaacttgaagtgttgttaaaataagcggagaccctttccttcaatttgaaagtttgttaaatttataatgagaatgaaaaaacacaattcggttggtagtccggatgcattatttaaaatgtcagtaaccttcccctcctcgggatgtccatcattcttcagtaaatttaggaggagggaatcgttatgaaattaacggtttactacgatggtcagttttgggtaggagtcattgaagttgtgaatgatgggaaattaagagcagttcgtcatttgtttggaaaagagcccaaggattcagaaatcatgcattttgttcataatcaacttttacagactctctcccgcactgaacaaacaggggtttgtgttaaagcaaaatctaagaagttaaacccaaaaagattacaacggcaagcttctaaagagatgaaaaatatcgggatatcaactaaggcgcaaaaagcgataaaacaggagcttgaagcaagaaaagaaaagaaaaaacaactgaacagaaaacaaagagaaaaaataaaggaacaaaaatatttaatcagaaaacaaaaagcaaaagaaaagcataggggcaaatagttggagaacccgaagcccttcgattaaaaagttgagcggcatcagttttttcttcggactgatttagaaaaaagaagcagaaatcgagcccttctcgagatgaggagggtttttctgcatttatttaacttcacctacatcagtaaatgagtcagtttcaattgatgaacggtttgatgaggatatttacgggccgacaacagcgcaaatgcagtcaaacgattccagtccatgtacggggagccaactaaaaccaagacatggatttccgaagctgatccgaacattgattcagtcgagtaaacaaaatccccccttctccggtaaagaaggagggatttgcggtgaagttgttgcgcctgtccttttaaagtttccccaaagctccccccaaatgaaaacatgagaatacatggttttacaaagcatctgaaagcaagcgattaaatttatcaacgccaagccttgatatatagggcttttaaaacatttttagttaaaagtctacaaattaatcagattattgtttataataagaataggcttaaacttaaataagcttataagaatttgttatgttcctctataagcataccggttatgtaaccgcaaccagtgaaatgtaagcattttcttaaaggggaaagggattgtttgcatgactcattttaagtaagccgtatgttttatatactctttaaaggggaattttgattgaaaaggagaggttgaatatgacagcaacacgcggtcttgaaggggttgtagcaacaacatcatctgtaagctctattatcgacgatacccttacatatgtagggtacgatattgacgacttgacagagaatgcaagttttgaagaaatcatttatttgctgtggcatctgcgcctgccgaataaaacggaacttgctgaactgaaaaaacagcttgcgaaagaagctgccgttccacaagaaatcattgagcacttcaaatcctatcccctcaataacgtacatccaatggctgcgctccggacggcgatttcattactcggtctgactgacagtgaagccgatgtcatgaatccggaagcgaactacagaaaagccatccgtctgcaggcgaaagtgccgggcattgtcgccgctttctcaagaatccgcaaaggacttgatcctgttgaaccgaaggaagagtacggaatcgcggagaacttcctttacaccttaaacggtgaagagccttctccgatcgaagtggaagcgtttaacaaagcgctcattcttcatgcggatcatgagctgaatgcatcaacatttacggcgagagtatgtgtcgccaccttatctgatatttactcaggcatcactgccgcaatcggcgctttaaaaggaccgcttcacggcggagccaatgaagccgtcatgaaaatgctgacagaaatcggcgaagtggaaaacgccgagccttatatccgcagcaaaatggagaaaaaggaaaaagtaatgggcttcggacaccgtgtgtataagcatggagacccgcgcgccaaacacttaaaagaaatgagcaaacgcctgacgaatctgacgggtgaaagcaaatggtacgagatgtcaatccgtgtcgaagaaatcgtgacgtcggagaaaaaacttccgcctaacgttgatttctattccgcatctgtctaccacagtctcggcattgatcacgatctgttcacgccgatctttgcggtcagcagaatgtcaggatggatcgcccatattcttgaacaatacgataacaaccgcctcatccgcccgcgcgctgattacacgggtccggataagcagacttttgttccgcttgatgaaagagcctgatcaaacgggaggctggtgattttcatgtcgttagcctcttgttaatcaagcccggattggtttacaattttgatagaatcttgagaaaagtcattttattttttatacaagaaaaataaaatgttttctaaatatgaattacatactgggaggtaatattgtgtcacaaggtgaaaaaattacagtctctaatggagtattaaacgtaccaaataatccgattatcccgtttattgaaggcgacggcacaggccctgatatttggaatgccgcttctaaagtattggaagccgctgttgaaaaagcatataaaggcgagaaaaaaatcacgtggaaagaagtttatgccggtgaaaaggcttataataaaacaggtgagtggcttcctgccgaaacactggaagacatcagagagtacttcatcgccatcaaaggtcctctgacgacgccggtcggcggcggtatccgttctctgaacgtggcgctgagacaggagcttgatttgtttacgtgcctgcgccctgtcagatatttcacgggagtgccttctccggtcaaacgtcctgaagatacggatatggtcattttccgcgagaatacggaagatatttacgccggaattgagtatgcgaaaggttctgaagaagttgaaaagctgatcagcttcctgcaaaatgaaatgggcgttaacaaaatccgtttccctgaaacgtcaggaatcgggatcaagcctgtttctgaagaaggcacaagccgcttagtcagagctgccattgagtatgcgatcgaaaacggccgtaagtctgtcacgcttgtccacaaaggaaacattatgaagttcactgaaggggcatttaaaaactggggctacgagcttgccgaaagagaatacggagataaagtattcacttgggctgaatatgaccgcattgtcgaaaaagacggaaaagaagcggctgataaagcgcagagcgaagcggaagcggcaggaaaaatcatcgtcaaagacagcatcgctgatattttccttcagcagatcttgacccgtccgagcgaattcgacgtcgtggcgacaatgaacttaaacggagactatatctctgatgcgcttgccgctcaggtaggcggaatcggaatcgcgccgggagcgaacatcaactatgaaacagggcatgcgattttcgaagcgactcacggaacggctcctaaatatgccggccttgacaaggtcaacccgtcatccgtcatcctttcaggagtgcttcttcttgaacacctgaactggaatgaggctgctgacttgatcattaaatctatggaaaaaacgattgcttcaaaagtagtaacgtacgattttgctagattaatggacggtgcaactgaagtgaaatgttcagagttcggtgaagagctcatcaaaaacatggactgaacctaaagcagacttctaatgaagccaaaaaaggagaagagaatcatgggaaaaacacgcagtaaagtttctgttatcggagcaggatttacgggagcgacaacagcctttcttacagctcaaaaagagcttgcggacgttgtgctcgttgatattccgcaattagaaaacccgacaaaaggaaaagcgctagacatgctcgaagcaagtccggttcaaggatttgacgcgaaaatcacaggcacgtccaactacgaggacacagccggttctgatatcgtcgtcatcacagccggaattgcgagaaaaccaggcatgagccgtgatgatctcgtatctacaaacgaaaaaatcatgagaagcgtcacacgtgagatcgtgaaatattctcctgactgcattatcgttgtattgacaaaccctgttgatgcgatgacatatgcggtgtacaaagaatcaggcttcccgaaagaacgcgtcatcggacaatccggagtgcttgacactgcgcgattcagaacattcgtcgctgaagaattaaacctgtctgtaaaagatgtgaccggttttgttcttggcggacacggtgacgacatggttcctctcgtccgttattcctatgcgggcggcattccgcttgaaacgcttatcccgaaagaccgtcttgatgcgattgtagaacgcacaagaaaaggcggcggggaaatcgtcaaccttctcggaaacggaagcgcctactacgcgcctgctgcatcactgactgaaatggtagaagccattttgaaagatcagcgccgcgtgcttccgaccatcgcttacttagaaggcgaatacggtcatgaaggcatttacttaggcgtaccgacgattatcggaggaaacggcctggagcaaatcatcgagcttgaactgacagactatgaaaaagcgcagctgagtaaatcagttgaatctgtcaaaaacgtgatgaaagtattgtcataagaaaaaagggaaggcttccgaatcagaagccttcctctttttacaattaatgaaagcgttttctttttccctgagcgatcctttctctgaaaatgatcaaaaaggcgaattgtctgaacgggcagtattggataaaatgaaatcataaagtgatatgcagcacataaaatagagaaaattggatgtcggggaaaatagacagcggagggcgcagcatgaacaaaaaaattttagttgtagatgatgaacaatctatcgttactcttttacagtataatctggaacggtccggctatgatgtcataaccgcatcagacggcgaagaggctctggagctggcagagaatgaaaatccggatttaatcgtactggatgtcatgctgccgaaagtggacggaatcgacgtctgtaaacagctcagacagcagaaaatgatggttccgatcttgatgctgacagcaaaagatgaggaatttgataaggtgctgggactggagctcggagcggatgattacatgacaaagccgttcagtccgcgggaagtcactgcgcgggtgaaagccattttaagaagggctgacatttcttcgctgtcacaaggcagagaagaggaaaaggacgggcagatcctcatcggcgagctgaaaattcttccggagcattacgaagcgtacttcaagtcagaacagctggaattgacgcctaaagaatttgaactgcttctgtatttgggaaaacacaagggaagagtgctgacgagagatcttctgctgagcgcggtctggaactatgattttgccggggatacccggattgttgacgttcatatcagccatctgcgcgacaaaatcgaatcaaataccaaaaaacccatctatattaaaacaatcagaggtttggggtataaactggaggagccaaaaatgaatgaataaagtccgtgtgcgtctgttcgctttactcgttgtatgtatcatattggttttcagtgttctcggcctttttttacagcagcttatttcttcatccgctgaagaaagaacggcggatcagctgaaaaaggaatcggtatacatagcgggccttcttgacaccggccgaatcggcaataaaagcaatgaaacggtaatccgtgacgccggccgcaccctcggtataaacgtctccttgctcaacgagaagggtgacgccgtatatcattccggcagtcgtgctgatgattcagccgtaaaggagttcatttctcacaataaaagcgaggaagccgtacagtcgaaaagcagagtcatccgcggcactgccgtaaaaaatgacgcagggaaaattgcggggtatgtactcgtttcctcggatatcaacggcggttcaagcgttaccggagaaatgtggggcatgctggcagcaagtctttgtaccgcttttatcattatcgttttcttttatacaaacatgacgtcgcgttacaaaaaatcaatcgacgccgcgacaaaggtggcgacggagctgtccaaagggaattacgacgcccgctcctacagcggttacgcaaggcggtcggaccgtctcgggcgtgcgatgaacagcctggcggtcgatttaatggaaatgacaagaacgcaggatatgcagcgcgatcgtctgttaaccgtcattgaaaatatcggatccggtttgattttaatagacgggagaggttttatcaatctcgtgaaccggtcatacacgaagcagtttcatacaaagcctgaacgtctgcttcggcgcctttaccacgatgcgtttgaacatgaggagatcattcggcttgtcgaagacatttttatgacggagacgaaaaaatgccagctgctcagacttcccatcaacattgagcggcgctactttgaagttgacggcgttccgatcatgggccctgatgatgaatggaagggcatcgtcctcgtttttcacgatatgacggaaattaaaaaattggagcagatgagaaaggacttcgtcgccaatgtctcccatgaactgaaaacaccgatcacctcgattaaaggatttacggaaacactgttagacggagcgatgaaagacgaaaaggcgctttcagactttctgtctatcattctgaaagaaagtgagcggctccaatctctcgtgcaggatttattggatttatccaagatggagcagcaaaactttacgatgcgcgtagagtcctttgatgctgcaaaaattctgcatgaaattgaggcgcttttgcagcataaggctgaggaaaaaggcatcagctttcagctcgatctcccggaagagccgatttttgtgacgggtgatgcgcacaggctgaagcaggtatttttgaatctggcgaacaatgccctgacctacacgcctgaaaaagggacggtggggatttcggtacatgtgaaagaaaccgttgtcgatatcaaagtgtccgatacgggaatcggcattcagaaagaagagatcccgcggatatttgagagattctaccgcgtggataaagacagaagccgcaactcgggaggaaccggcctcggcctcgccattgtgaagcacttaatagaagcccatgaaggtaaaatcgaggtcacaagcgagcctggacagggaactgtgttcactgtgacgctgaagcggccgccggcagcgtgatcagctttacaaaggattaacaatttcttcatgacctgttaaacctatcttgttaggatataacagaaccccttcatccaaggagccaattttgacggcgggaacgcgttttcttgttcccgtccttttttgcgttttcacggggtccgctcattttcctttcaaattgaactttgttaaaataagagaagctgtgagattaaaaaacagaggaatgacgagcttttgctcttaggaggatattgaatgacggaacgaaaaaaattagtgcttgtcgacggaaacagtctggcgtaccgggcgttttttgcattgccgcttttaagcaatgaaaaaggcattcatacaaatgccgtatacgggtttgcgatgattttaatgaaaatgctggaagatgaaaaaccgacccatatgctggtggcttttgatgcgggaaaaaccactttccgccacagcacgtttaaagaatataaaggcggaagacaaaaaacgccgccggagctttcagaacagatgccgttcatccgcgagctcctcgatgcctacaacatcagccgctacgagcttcctgaatatgaagcggacgatattatcggcacgcttgccgtatctgctgaaaaagacggctttgaagtgaaggtcgtttcgggggacaaggacttaacccagcttgcaaccgggaaaacgaccgttgccattacgagaaaaggcattaccgacgtagaagattacacgccggagcacgtgcgggaaaagtacggtctgactcctttgcaaatcattgatatgaagggattaatgggagattcatccgataacataccgggcgtccccggcgtcggagaaaaaaccgcgattaagctcttaaagcagttccattcggttgagaaactgcttgattccattgatgaagtcagcggaaaaaaattaaaagaaaagcttgaagaatataaggaacaagccctgatgagcaaagagctggcgacgattatgacaaatgcgccgattgaagtcaagcccgaagatttagattaccaagggtttgaccgtgaacaagttgttgccatttttaaagacctcggttttaatacgcttcttgagcggctcggtgaagaaagcggggaaacggcggaagaaaattttgaagacatcaatgtcgaaacagcagaagaaatcaccgaagatatgctcgtttcgccgtccgctttggtcgtcgaacaaatcggtgataactatcacgaagaaccgatcctcggcttttccatcgtgaatgaaacaggtctttattatattccgaaagaaatcgccattcagtctgaagcttttaaatcttgggctgaagatgaatcgatgaaaaagtgggtgttcgacagcaaacgttccgtcgtcgctttgcgctggcagggaattgagctgaagggaacggaatttgacgcgcttcttgctgcctacattataaacccgggcaattcgtacgacgatgtcgcgagcgtagcgaaagaatacgggctgaatatcgtttcaaaagatgaagcggtatacggaaaaggcgcaaaacgcgccgttcccgctgaaaaagagcttgccgatcatctcgcgcggaaagcgtctgccgttaacagcctccgtgacaaactgcttgacgctttggaagaaaataatcagcttgagctttatgaagatcttgaactcccgcttgcgctaattctcggagaaatggaatcaatgggcgtcaaagtggatgtggaaagactgaagcgaatgggagaagagctcaaggcaaaactgaaagaatatgaagaaaaaatccatgacatcgccggtgagccgtttaacatcaattcaccaaaacagctcggcgtcattctgtttgaaaaactcggcctgccgccagtaaagaaaacaaaaacaggctattccacttcagctgatgtgcttgagaagctcgcagacaaacatgatatcgtcgcgtacattctgcaatacagacaaatcggcaaactccaatcgacttatattgaagggctgctgaaagtcacgcgcaagggttctcataaggtgcatacacgattcaatcaggcattgactcaaaccggacgcctcagctcaacggatccgaacctgcagaatattccgatccggctggaggaagggcggaaaatccgtcaggctttcgtaccgtccgaaccggactggcttattttcgccgccgattattcacaaattgaattaagggtgcttgcgcatatttcaaaagatgaaaatctgatcgaagcgtttacgaatgatatggacattcacacaaaaaccgccatggacgtgtttcatgtcagtgaagatgaagtgacacaagcgatgcgccgccaggcaaaggccgtcaatttcggcatcgtttacggcatcagtgattacgggctgtcgcaaaacctcggcatcacccggaaagaagcgggcgcttttattgaccgctatttggagagcttcccgggcgtcaaggcgtatatggaagaatcggtgcaggaagcgaaacaaaaaggatatgtgacgacacttatgcagcgccgccgctatatccctgagctgaccagccgcaacttcaacctgcggagctttgcggaacggacggccatgaatacgccgattcagggaagcgccgccgatattattaaaaaagccatgattgacatggcagctgagctgaaagaaaaaaacctgaaggcgcgactgttgcttcaggtgcacgatgaattaatttttgaagcgcctaaggaagaaattgaaatattagagaagctggttcctgaagtgatggagcatgctttggcattagacgtgccgctgaaggcggattatgcttcagggccgtcttggtacgatgcaaaataaacagaaaaaaaggaagtgatgattgtgccggaattaccagaagttgaaacggtccggcgcactctgaccggtcttgtgaaggggaaaacgattgaatcggcggatatcagatggccgaatatcatcaaaaaacccgccgagccggaggaattcgcgcggcagattgcaggagaaacgatccgatccatcggaagaaggggaaagtttttgcttttccatttggatcattatgtcatggtgtcacacctgcgtatggaggggaaatacggtcttcatcaggccgatgagcctgacgataaacatgtgcacgtcgtgtttcacatgacggacggaacacagctccgctaccgggatgtccggaaattcggcacgatgcatttgtttgcgccgggagaggaacggaatgcattaccgctttcacagctcgggcccgaacccgatgatgaagcatttaccgccgcttatttaaaagagcggcttgcaaaaacgaaccgcgcggtaaaaaccgccctgctcgaccaaaaagcggtcgtcggcctcggcaatatttatgtcgatgaagctttattccgggcgcgtattcatcctgaaacaaaagcgaacagtctgtcggacgggcagataaaaacgcttcatacagaaattaaagacacccttcaggaagcgattgacgcgggcgggagcaccgtccggtcttatatcaattctcaaggggagatcggaatgtttcagctcaaacattacgtctacggcaaaaaggatgaaccgtgcaaaacgtgcggcacgatgatttctaaaatcgtggtcggcgggaggggcactcatttttgcgcccgctgccaaaaaaaatcataaactgaagctgttcaagcaggcggcagcagaatgacttttttctaacacagttgatgacctttctccatatatatattgtgattcacccaataggcatatgtcacaattgccgatcaagagaaagggagaaacggatatggagattgtttctttgctgcttttggcttttgctgtcagcttggacagtttttcagtcgggtttacgtacggtttgagaaaaatgaaaatcccgttcaaagcgattgccgtgatcgcctgctgttcagcctctgtgatgtttatatccatgctgatcggccattttctgacaaagatttttcctgtatccgtcacggagaaactgggcgggctgatcttaatcggaataggggcatgggtcatctggcaattttttaaaccggctaaagagccggattacttattgcatgaaaaaacgctgcttaatcttgaagtgaaatcgctcggcatcgtcattcatattttgaaaaaaccgaccagcgccgatattgatcaatccggaaccattaacggagtcgaggcgcttctgctcggtatcgccttatccattgacgcgtttggcgccgggctgggagcggccattctcggcttttctccggttatgatgagcgtgactgtcggggtgatgagctcgctgtttgtttcactcggcataaacgcggggcatttgctttcaaggtggaattggatagataaaatgacatttttgccgggagtcctgctgattatcatcgggatttggaaaatgtaagaaggagtgggctttttgagcttggtcatcggtttaacgggaggcatcgcaagcggcaaaagcacggtagcgcgtatgctgatcgacaaaaaaataacagtcattgatgcggatgtcatcgcgaaacaggcggtggaaaaaggaatgccggcttacggacaaattgtggaagcattcggaaaagacatcctgctggaaaatggcgatattgacagaaaaaaactcggttctatcgttttcactgacgaacagaagcgtctgaagctgaatcagatcgttcatccggcagtgcgtgcggaaatgctgaaacagcgggatgaagccattgcgagaaaagagcagttcgtcgttttggatataccgcttttgtatgaaagcgggcttgattatcttgtcggcaaagtgctcgtcgtcaccgtaccggcagacattcagctcaaacggctgatggagcggaattccctgacagaagaagaagcgatgagccggataacgtcgcaaatgcctttagcggacaaagcaaaaaaagctgacgccgtcattgataacagcggcagtcttgaatatacaaagcaccagcttgaggaagtattgagcggctgggcataaacaaacaccgttcggaaagccgaacggtgtttttctggttaaaaatcaaaattgtcagggtccggaccgacacggagattttcgttcagatcatcaatccgcttcatatcttcagctgacagttcgaaatcaaagacatttgcattttcttcaatacggtgttttttagttgatttcggaatggtgatgacaccgttttgcaaatcccagcgcaaaatcacttgagcggctgatttgccgtatttctcagcaatctcctgtaatacggggtgatcaagcagctgcccttgcatcaatggcgaccacgcttcaagctgaatgccttgttcagtgcagaaagcaagcagttctttctgtgtcaggcgcgggtggtactccacctggttgatcatcggcttgatttccgtttctttcatgagatgtttcaggtggtgaatttggaaattgctgaccccgatcgccttaatgcgtccatcccggtagagggtttcgagcgcccgccacgcatcgatgtactttccttcgacaggccaatggatcaaatataaatctaaataatctaaaccgagtttttctaagcttgtgtcaaacgcttttaacgtttcttcatatcctaaatcggcattccatacttttgacgtgacaaaaatgtcttcacgttttaatcccgcttcttgcagcccttggcggatcccttcgccgacaccttcttcatttccgtaaatcgcggcggtatcaacgctgcgatagccgtgcaccaatgccgttttcaccgcgttgacgagttccgcgccttcctctactttgaaaactccgatgccgaaccaaggcatctctactccgttatgcaatgttgcttttgcttgtaaatgtgttgtcatgtatatattcctcctattatttgtctgtcgaaaaaaatcaaaatgcgctgaagaaaaactcacctcctttcaagggcagtgcgatcccgcttttccagcttcctgctccatccggttaatacgaccgcgctgagcaccatcagcgccccgatccaagcggtatgaatgattccgattgagtctgtaatgattccgccggcaaacgagccgatcgcgattccggcattaaatgccgcgatatttaaggctgatgctgtatcaacggcgcttggcgcaaaacgttcactcagcatcacgacatatacctgaagccccggcacattcataaacgccaacagccccatgaaaataatggtgatcagcccggctgttttaaacggcgcggtaaaagtcaggacaaacagcacagctgcctggacaatgaacatataaaacaaggctttcagcggattccggtttgataaacggccgccaatcatgtttccgatggcaatcgcaattccgtaaatgagcaggatggccgcgacggtttctttctgaaaacccgttacctcctgaagaagcggagataaatacgtaaacacgacaaacgttccgccgtagcctaacgctgtaataataaataaaagcaataaccggccgtttgtgacgagtttgacctgctcggaaaatgcggttttcgtccctttgcgcaaatgagacggaacgagaagcgcgtttgtgaggaatgcgatgattcctaccgccacaatcacggcaaatgcgattctccatccgaattgctggccgagataggtgccgaacggaacgccggtcaccgtagccaccgtcagccccgtgaacataatggaaatcgcgcttgctcttttatgctccggcacgatattggcggcgatcgttgccccgattgacatgaaaatgccgtgggaaaaagccgaaatgacccgtgccgccagtaagacgccgattgaggaagcgctcgctgcgagtgtatttccggcgataaaaatcaacatcacccagagcagcagtgttttccgcgacatgccggatgtgagagacgttaaaaccggcgcgccgaatgtcacgcccagagcatacatggaaacggtaagtcccgccgttgtcacaggtatatgcagatcttgagatataagcggcagcagtccgacgctgataaattcggttgtgccgatcgcaaaagcgctgacggctaatgccagcagcgctggtaaatagctttggcgatgtgaagacatctgttttcctccttaaacgataatgtatggttgaaatgatgccgggtaaacgatataagtataagagtacattccttttcagccggcaaatgtcattatgattgatagaagtgtcattgaaaagaacgtacttttaagtgccataggcactttttagttcctatagatgaggaggaattaccgttgctgaagaaaaaatacaatatatccgtagaggcggcgcttgaagtgatcggcggaaaatggaagtgtgtgatcctctgccacctcatgcgcgggaaaaaacggacaagcgaattgaagcggcttatgccggacatcacccagaagatgctgacacagcaattgcgggagctggaagctgacggcgtcatcaaccggatcgtgtacaatcaggtgccgccgaaagtggaatacgagctgagtgaatacgggcacagtctggaaagaattttaaatgcgctgtgtgactggggcgcgatgcatattgctaaacggtacggcgaggtgtcttccgttttagaggacagcattttgaatgacaaatttaaagaaccgggacaaatataagaaaaaagcaggcagcctgagacgctgatcctgctttttttatggaagaaaaatcattttatatgcaaaaaaaccgattgaacaacatattgatcggtataagggtggatttttatcaagttgtactggcggatttcttttaatgtgttatactatatataaataaaggtaaattagagtggcatattaaaaaggggtgacctgagcatgaaggtaaaagtagcaataaacgggtttggaagaatcggaagaatggtgttcagaaaagcaatggaagatgatcaaattcaaataacagccattaatgcaagctatcccccggaaacgcttgctcatttgataaagtatgacacaattcacggcaaataccatcaagaagttgagaccgccgacgacagcctgatcgtcaacggaaaacatattatgctgttcaatcgccgggacccgagagagcttccgtggaaagaatgcggaatagacatcgtcgtagaggcaacggggaaatttaattcaaaagaaaaagcgatgagccatattgaagcaggggcgaaaaaagtcattttaacggctccgggcaaaaatgaagacgttaccattgtcatgggagtaaatgaagagcagttcaatcccgatgaacatgtcattatttcaaatgcatcctgcacgacaaactgtcttgcgccggtcgtcaaagtgcttgatcaggaattcgggattgaaagcgggctgatgacgactgttcacgcttacacgaatgatcaaaaaaatatcgacaatccgcataaagatctgcggagggcgagagcgtgcggagaatccatcattccgacttctacaggcgccgctaaagcgctgtcgctcgtgctgcctcatttgaaaggaaaacttcacggtctcgctttgcgtgttcccgttccgaatgtgtcattagtggaccttgtctgcgatctgaaaacagatgtgtcggccgagcaagtgaacgccgctttccaaagagcctcaaaaacgtcgatgtacggaattcttgattattcggatgagccgctcgtttcttcggattataatacgaattcacactctgcgatcatcgacggactgacaacgatggtgatggaagaccgaaaagtaaaggtgctcgcctggtatgacaatgaatggggatattcctgccgggtcgttgatcttatccgtcacgtcgccgcgcgaatgaaacacccgtcagctgtgtagactaaagatcatggacatttgttagaaaaaaacccttaacggcatattcgcaaaaaacacaccttgcaaaataaacttaaacacagtatactatctttcgtgaacttcttgctcgtgactgcttcggaattacttaaagggttaggacctctccggactaactttcccccgtggtaaatggccgggtcagttctcggaaattcacttttttaattcttgttaaggggggtccatgattatggaaacaatggggcgtcacgtcatctccgagctgtggggatgcgattttgataagctcaatgacatggattttattgaaaaaacgtttgtaaatgctgctttgaaatcaggagctgaagtgcgcgaggtcgcatttcacaaatttgcaccgcaaggcgtaagcggagtcgttattatctctgagtcacatttaacgattcacagttttcctgaacacggatatgcaagcattgatgtttatacttgtggagacctggatcctaatgtggctgcggattacattgcggacgcattacatgcagatacaagagaaaacattgaaataccgagaggaatggggcctgtacagattaaacaggcacaagcgaaagtactgtaattttcaaaacgcaaacacaagggagctaagctgaaaaagccattacgcgctttgaagctgatgctccttttctaatgtaaaaaaacagcattgctttttctttaagcattttttttgtaaaatagaaaagataaggccggtctatcggctctcccaacaaataggctcatcctagaaacgttggcgggcatttaccggaagcttgcgaaccgcattacagcaacgaaacagatgggagctgatccaatttgaaatgtccttcatgccagcataacggttcccgcgtacttgattcacggcctgcggacgaagggaaatcaatccgcagaaggcgggaatgcgaagcctgccattaccgcttcactacatttgagaagtttgaagagatgcctctgatcgtcgtgaaaaaagaaggcgtccgggaagaattcagccgtgaaaaaatgctgcgcgggttaattaaagcttgtgaaaaaaggcccgttcctttgaaaacattggaagacatgtgctttgacattgaaaaagagctgagaaaccaaggcgtatctgaagtcaaaagcgaacttgtcggtgaaatggtaatggaccgcctggcgaaaatcgatgaggtgtcttatgtccgctttgcctccgtctaccggcagtttaaggatataaacgtgtttatcgatgaattgaaagatttaataaagaaagaacgctgagagagctaagagattgtgtctggctcttttctcatgagcaaaattggcatttgatagatcgcagaaacggtgtaaaatgagagtagaaacatatcggaaggtttgagaatcatggctgactattggaatgacgtattgcctgtagatccttatacggtcaaaagccgttcgcttcttcaggatgtcgacagacaggttttgacacatctgtaccagccgctgatcggttcttttgcattctccctttatatgaccttatggggggagcttgagcagaaccgcttgtggggagcggaatccacgcacaggcagctgatgggcatgatgcagtcaaatttaaaaaagattcatcatgaacagggaaagcttgaaggaatcggactgctgaaagtgtatatccgggagtccgagcaaaaagagcggatgtttatttatgagctgctgcccccgctcaggccgaatgatttttttgaagacggcatgctgaatgtctttctttataacagagtcggtaaaacgaaataccagcagctgagacaattttacacgcacccttccgtcggcgcgggcgcaagggaaattacccgtccgtttaatcacgcttttgcctcttttcagccgagtgaatggaaaatgacgcctgatatggaagaggcgatgaagctccccgaggactatgagacggcgtctgtcggacaagcgccttcctatacggtgacggaggaagtgtttgattttgagctgtttttggcggggttatcagaaacgatgataccgcgcaaatcaatcacacaggatgtgcgggagagcattaaaaagctttcatatttatacggaatagatcctatctccatgcagcacgtcgtcatgaccgcaattaatgagcaggatacgataacggccgaagcgctgaggaaagcggccagcgactggtaccaaattgaaagaagcggcaagcttcccgaactgattgataaaacacagcctgtcaccttgagagaaaaccggacggaaaaggacgattcattgaacggcgaactcatcgcacagcttgagaccatatcaccgagaaagcttctccaggacattgcggacgggaccgagccgtcaaaagccgacctgcagattatcgccgatattatgttcgaacaaaagcttgagcccggcgtcaccaatgtgctgatttattatgtcatgctgaaaacggatatgaagctgtccaaaaactatatccaaaaaatcgccgcccactgggccagaaagaaagtcaaaacggtacgggaagcaatgaagctcgcaatcgaagagcacaggcaatatcttgattgggcggacggcaaaacaaacggcgcggcgcgcggcaaaaaaaccgtccgggaagaaaagcgccctgattggatgaaagaagaagaaaccgggaagaaacaagaacagacggctctttccgcacaggatcttgaagaacagaagaaaaaaatgatggaagaaatgaaaaaactgaaaaaatactctgcctattgagacagagaagcggggtgatattgaatggaaccgatcagccgatccttagaaggcgtgacgaaaagacctgactttcaaaaacgcctggaacgaatgcagcagcaagttatggccgacgaagacgtccaggcttttttgaaggaacagaaagatgttatcaatcaaagcatgattgacagagggttaaataaactgtacgaattcgttcagcaaagtaaacagtgcgccttctgttcgaaagacagccggacgaacagcctgcttgaaggctaccatccgaagcttgtgatcaacgggcgttccattgatattgaatattacgaatgtccggaaaagagaaagctcgaccgccagaaaaggcaaaagtccctgatgaagagcatgtatatccagcaggatcttctcggcgcgacgtttcagcagatcgacattaccgatccgagcagactcggcattttccagcatgtgacggattttctgaagagctataatgaaacgggaaaaggcaaagggctgtatctgtacggaaaattcggaatcggaaagacatttattttagccgccattgccaatgaactggcggaaaaagagtattcatcaatgatcgtatatgttcccgaatttgtcagagagctgaaaaactcgcttcaggatcagtcgctggaggcgaaactgaatatggtgaaaacgacgcccgtactgatgcttgatgacatcggagcggagtcaatgacaagctgggtcagggatgaagtcatcggcaccgtgcttcagcacagaatgagccagcagcttcccactttcttctcgtctaatttttcaccagacgagctgaagcatcattttacgtattcacagcggggagaaaaggaagaagtaaaagcggcaagactgatggagcggattttatatttggcttcgcccgtccgtcttgacggggaaaaccgccgccgttcatgatgccggcgtccaatgggaaggatttgagggaatgaggaataagaaggctgtcacttgggctgcggctgcggcgggagcgggtcttttgctgtgggcaaaccgcaaatatctgaatctgtcgcctaaggagatccggctgtgggtgttatcgttcggtgtttttgcgccgcttgtgtttatcggaatttccatcgtcaggccttttgtgctgtttcccgtatcaatcgtttccgtcgccggaggattggcgttcggcccgtttttcggcaccatgtatacgctggcgggctcaatgggcgctgccgccgcgtctttttttgcggcggggctgtttgcctttaatgagaaaagccgtcatggaaaaatggaagccattcaaaagcagatgaaaaccaatggcttcttttatatttttatcctgcgcattctgcctgttaactttgatgtgatcagctatgccgcgggcctatcgaaagtcaggccggtaacgtattttttggcgaccgcagcgggcatcattccggggacgatcgtcctgaatgtgctcggcgcgagctttatgtccggcaatgtgctggccgtactctgcgtgatctgtctttacgtcgtatttttatcgcttcccgttatatttaaaaagaaggtgcgtcatttgttcggcggtgaaagctaacctttacgtctattttaaaaacatcccccatatacttgtaacagatgccgtaaggggggacaaatatgcttgaagtgatctttgaagatgaccacgataccgccgcttttttacatctcattcagcaatcggacgaccggagacattttattgtccgtgaaggcataaaaaaagtcggaatcgcaaggtctgaaacggctttttgcgttcagcgctttattgagccgatacttgtcaggttttttttggaatgcaaagaagacgagcatatgctttcgcttattgaggacgcatactgcttcaccgatcaggatgaacagcagcaaatccttcagcttgcacacagcattatggaaggagagcttgaggatcatccgtttgagccgaagaaagagccgcgcacacagtttatttcagatgcgctccgaacgatttcacttgatgcgggtgttttttccgtgcgttcgtttcagacgttccggctcggcaggtattatgagaggctcagagaatatacggaggccgcgatagatgaataccggatggaacaggaatatcaaaactttatccagtctctgagagattatgtgacatccaatccgccgcggatgaagaaagtccgcatcgtacatgaccgggcttttacgctgtgggagctgcgctatgtgtctgaacgggaacagaaaaaatacatagacagacggtttgtgcgggagcacccgatgtatatagattcccatctccttgcgccgctgatctccattgcgcctgagacggtcgaactgtatacggacaaaccggaacatatgatgtcaagaaccattcaaaacgtgtttcaggagagggtgcgcctttttccgctgggcgcgtttgcagccgagaagacggaaggatagccgcacggacggccttgtgtaagcggcagggctgtctgtgcgaaatcagacggaaaaccgagttgcatttttctcacagacattttataatacataaaagattaatgattgctacacgtattgataaggacatgaagcattgataccggctgtataagagaggagagcccaggctgaaagctttccagctatggatcattgtctttaccgcctttgaacttcagctgtgaacgccggaataagcgccagtaatagctgacgggaactcccgttacagagcttagagccgcagtgccgaagcaatcggccgcgcggaaaaaagggtggaaccacgattccgtttatttaacctcgtccctttcatagggggcggggtttttgatttgcataaaaaaaggagtgacgaagatgtcagatatgatcaacatcacatttccggacggagcggtaaaggaatttccgaaaggaactacaacagaagatatcgcggcatccatcagtccgggattaaagaaaaagtctttagccggaaaactgaacggacaggaaattgatttaagaacgccgattcaagaggacggtgccgtagaaatcattacagaaggcacagaagaaggtttgaacatcatgcggcacagcacggcgcatttattggcccaggcgattaaacgcatttataaagatgtgaaattcggagtcggccccgtcattgaaaacgggttctattatgacgttgaaatggagcaggcgctgacgccggatgaccttccgaagattgaaaaagaaatgaaacgcatcatcggtgaaaatctgccgatcatccgaaaagaagtgagccgtgatgaagcaaaagccatgtttgcggaaatcggcgataatctgaagcttgaactgctggatgcgattccagaagacgaaacggtctctatttatgagcagggcgaattttttgacctgtgccgcggcgtgcacgtgccgtctacaggcaaaattaaagaatttaagctgctgagccttgcgggcgcatactggcgcggcgacagcaaaaaccaaatgcttcagcggatttacggcacggctttctttaaaaaggatgacttgaaagagcatttgcgcatgcttgaagaagcgaaagagcgtgaccaccgaaaactgggcaaagaattaaaattgtttgccaactctcaaaaagtcggacaaggtctgccgctctggctgccgaaaggcgcgaccatccgccgcgtgatcgagcgctacattgtggataaagagctgagcctcggttatgagcatgtgtatacgcctgtcctcggaagcaaagacctgtacgaaacatcagggcactgggatcattatcaggatacaatgttccctccgatggaaatggacaatgaaacactcgtgctccgtccgatgaactgtcctcaccatatgatgatttacaaacaggacattcacagctaccgcgagcttccgatccgcatcgccgagctcggaacgatgcatcgttatgaaatgtccggggcgctttcaggtcttcagcgcgtacgcggcatgacgttaaatgacgcgcacattttcgtccgccctgatcagattaaagaagaattcatccgcaccgtccgtttgattcaagacgtatacgaagacttcggactgagtgattacacattccgcctgtcttaccgcgatcctgaagatacggaaaaatattttgatgatgatgagatgtggaacaaagcgcaatccatgctgaaggcggcaatggatgagatggggcacgactattatgaagcggaaggcgaagcggcgttttacggccctaaacttgacgtgcaggtgaaaacggcgatcggcaaagaagagacattgtcaactgtacagcttgacttccttcttccggaacgctttgatctcacttacgtcggagaagacggcaaacagcaccgccctgtcgttattcaccgcggcgtcgtatcaacgatggagcgtttcgttgctttcttaatcgaagagcacaaaggcgcccttccgacatggcttgcgccggtgcaattccaagtcattcctgtatcaccgtccgtgcatcttgactacgcgaaaaaagtgcaggagcgcctgcagcgcgaaggcctgcgtgtcgagcttgacagccgggacgaaaaaatcggctataaaatccgtgaagcgcaaatgcaaaaaatcccgtacatgcttgtggtcggtgaccaagaagcggaaaacggcgcggtaaacgtccggaaatacggcgagcagaaatcagaaaccgtctcattggacgattttgtgaaaaaggctgtagcagaagcgaaaaaataaccggaaatacaaaaaaccccgttcattcagaatggggtttttttgcgtataaaattatctttctttttgtttctctataatcgcaaacagctcgtgaagatcgctgatcacgtaatcaggcgcaatgtccgtatcatttttcttttgtgtccggtttacccagactgtcgtaatgcctgcccgtttcgctcccaatatatcagtattgaggttatctccgaccataatggcgtcttcttttttcaggttcaggaggccgaggcaatgttcgaatatggaggcatcgggtttcccttttccgaaagcgcctgagatgacgatttcattaaaataaggcgcgagctcaggaacgccggctagtttttctttctgcaggctgggatcgccgtttgtcagcagaagcaattcataaacacctttcagcttatcaagcaccgcaaacgtttcatcatacacatacgggcgctgtctgcgttccgccgcgaaaaactccgccaaatattcgccgtaagccgcatcgtctataccgacgctttttaagccgttcgtccaggcgtttcgtctgtattccggcgcaatccgattcagctgtttaaatccttcgctgaccggctcggaaaaattcgcccataatccttcaaacggattaatgccgatcatgaccgtataaggataggtttcgtatgacatatacaattcccgtgccgctttccgtaccgcctcttcaaatgtttgcgggtcaaggccatattttttttccgcttgtaaacatgtttccctgaatgttgttctgacgcttttttcatcccataacagtgtatcgtccaaatcaaaaaatacggctttcatgatcttctcctctttgttatattctgaaactctctgccgcaaggctcccgtttattctacaatagatacatagactgtgaaagatttgttttcagatgatttgaaaaaaacaggcaggtttgtgtcagattctgtctcgggctctaaaacgtgataaaataaaatttgaaagaacaggtgaaaagtatgctgcatttgatcatcatgatgctggaaagagtcggaattatcgtcatattgggatttgttctggctcataccagattgttcagacaggcgctccagcagcctgagagctataaaggcaaagcggtgctgatttcaattttctcgctgttcagtatcatcagcaactatacgggaatagaaattcagcagaatacaatcatgaataatgactgggtgtttcaaattaatccgtccggttcaattgccaatacaagaattatgggcgttgaaatcggcggactcttaggcggcccctatgtggggatcggcgtcggcatactggccggcctgcatcgtttatcactcggcggcgcgaccgcagtcagctgtgccgtctcatccgttttagcgggcattttgtccggctggatcggacggtatttcagaaaacgctacaggatgccgacaccgcgtgtggccgcgcttgtcggactcgggatggaatcgctgcaaatgctgctcatcctcttgatggccaagccgttttctgacgcttggacgcttgtgagcatcatcggcatcccgatgatattggtaaacgggtcagggacttttatttttctttcgatcattcagtcgattatccggaaggaagaacgggcgagagcccttgaaacccacagggtgctgatgattgccgatcagacgcttccgtatttccgccaggggctgaatgaaagctcatgcaaaagcgtcgccgccatcattcacaggcaaacaggaacggacgcggtatcgcttacggataacgaaaagattttggcgcacgtcggcgcgggtgccgaccatcatattccgtctgaaagcctgattaccggattgtcaaagcgcgttattaaaacgggtcatattatgaaagcgacatcaaaggaagaaattgaatgcacgcacgatccctgtccgctgcatgcggcgattgtattgccgctgacgtcaaacggcaaaacgatcgggacgctgaaaatgtactttaaaagcccgtcaggtttaagccgggttgaagaagagcttgcagaaggactcgccatgctgttttccacacagcttgaactcggcgaggcggaactgcagagcaaattgctgaaagacgcagaaataaaagcgcttcaagcacaggtcaatccgcattttctgtttaatgcgatcaatacgatttctgctctttgccgtacggatgtagaaaaaacccgaaagcttctgctgcagctcagcgtctatttccgttccaatctccagggggcaaggcagctgctcatcccgctttctaaagaactgaaccatctgcaggcgtatttatcattggagcaggcccgttttcctgggaaatataaaatcagccttgaaatcgaacgcggtttggaggacatcgaaattcctccttttgtgctgcagattctcgtcgaaaatgcgcttcgccatgcattttcaagaaagcaggacagctgtgccgtcaatgtgagcgtggtatccgccggtcagtcggttttaatgcgggttggagataacgggcggggaattgatccggaattgctgtccgtgctcggaaaccgtccgctcccgtctaaagaagggacgggaaccgcgctttacaatttaaatcagcggctgatcgggctgttcggccccaaggcagccctgcgattggaaagtgaggccggcaaaggtacggacgtatcatttgagctgcctttgaaactgatgactaaaggagaagaacatgctgaaggtgttaatcgttgatgatgaaatgctggcaagagatgaattagcttatttgctgaaacggacgaatgaagtaagtgacataaacgaagctgaaaatattgaatccgcttttgacagtatgatggatcaaaaaccggatctgctgtttttggacgttgatttgtcaggagaaaacggatttgatattgccaaacggctgaaaaacatgaaaaatccgccggccgtcgtttttgcgacggcgtatgaccaatttgctttaaaagcttttgaagtcgacgcactcgattatttaacgaagccttttgatgaagaaagagtgcgccagacgatcagaaagtttaaaagagtgaagcaggacagggcaggagccgtctcggagctgccgtccgcagccggagcgcataaactggctgtatcagccggtgaatctattgtcattttagatacgaaggacattatttacgccggcatggaggacggacacgtttccgtcaaaacgtttgccgcgtcttattccgttcatgaaactttggcggtcattgagaaaaaactgcctgatacgggtttcttgagagtgcaccgcgcgttcatcgtgaatacggagcatattacggaaattcatccgtggtttaattcgacttacaatctgatattaaaagacggttctaaaattcccgtcagccgtacatacgccaaggacttaaaaaagctgcttcatattatatgaggcggcttttgcatttcagcagccgttttttgcatttcagaatgaatattcagccgtttgttatgaaagcgctttaaaaatcgatttctcttttataatggacctaacaaagagaaagaggtgaagaaaatgagtgcgaaaaaagtgtacggatttctgacacaagcatttatttttgccgtagttatgctcatatctaatgggattgcagcgattgtccccattcctatacccgcttccgtagtaggtttggtgttattatttgtcctcttatgcctgaaagtgattaagcttgaacaagtagaaacgctgggaacatcattaacgtcactgatcggatttttatttgtcccgtcgggcatctccgtgatgaattcacttggcgtcatgcagcagtacggcgtgcagatcgcactcgtcatcttactcgccaccatcattctgttaggggcgacaggccttttttctcagctgatcttgtctgtcagccaaaaacgtcagaaggctgctccggctgataaacaaacggtgcgccgttccaatcaggaaaacgaacttgtgcagcattaggagggaaaacggatgagtccatatttcggtattgtcgtttcacttgcggcctttggcatcggcacgtatttatttaaaaaaacgagaggctttttcctcttcaccccgctgtttgttgcgatggtgcttggaattctttttctgaagctcggcggtttttcgtatgaagattataaaagcggaggagacattattaaattcttcctggagcccgcgacgatcgcttttgccatccctttatacaaacagcgtgccaagctgaaaaaatactggtggcagatcatgtcttccatcattgtcggctctatctgctcagtcacgattgtctatttgatcgcaaaaggcattcatctcgacgcggccgttatgaaaagcatgcttccgcaggcggcgacaacggcaattgcccttccgctgtcaaaagggatcggcggcatcaccgacatcaccgctttcgccgttattttcaacgccgttatcgtctatgctcttggcgctttattcttaaaactgtttaaagtaaagcacccaatctctaagggactggctctcggcacatcaggacacgcactcggtgttgcggtcggcattgagatgggggaagtagaagcggcaatggcaagtatcgcggttgtcgtcgtaggagtggtgacggtgctggtcattccggtattcgttcagctcatcggaggataaacccgggtcatagacccgggttttttattgtgttggcacgtccgcgggcggcaaagaacgaaatttcacatttttccttgcgctcaccccggcatcgtgttaaaatgaaaaagttgatccggagaagtcattcttgactaatgatccggtattgtgtagaatagttattgaattgaatataaatcacaagcagaggcacccgcttctcacctgattgacacattcatgtagttggcaggttgaccgtacatttttatttatgcagatgttcgtagtgtgggtgtgttgtcatgcccgcactttttgtttgcctgcagaatgcagtcaaaaagcgttgtgaatcaattcgaagaaactatggaggtggctcattattagcaaagatcaattggttaatgagggtatccgtgcacgtgaagttcgtctgatcggacaaaatggcgatcagctcggcatcaagtcccgtcaggaagcacttgaaatcgccggccgcgcaaatcttgaccttgtgttagttgcagcaaatgcaaaaccgcctgtctgccgcatcatggactacggtaagttccgattcgagcagcagaaaaaggacaaagaagcacgcaaaaatcaaaaaatcattaacttaaaagaagttagattaagtccgacgatcgatgagcatgactttaacacgaaattgcgcaatgcgattaaattccttgaaaaaggcgataaagtgaaagcttctatccgctttaaagggcgcgcaatcactcataaagaaatcggccagcgcgtattggaccgtttctctgaagcatgtgcggaagttgcgacagtcgaaacaaaaccaaaaatggacggccgcagcatgttcttaatgctcgcgccgaaaaacgaaaagcaataaggaggaaatcccatgccaaaaatgaaaactcaccgcggatctgctaaacgttttaaaaagacaggttctgggaagttaaaacgttctcatgcatacacaagtcacttattcgccaacaaatcccaaaagcaaaagcgtaagcttcgcaagggtgctattgtgagcgcaggagacttcaaacgcatcaaacaacagcttgccaacatcaagtaatcggacaaggaacaattaggagggaaatctaatgccaagagtaaaaggcggaactgttacacgtaagcgtcgtaaaaaggttcttaaattagcaaaaggttatttcggttcaaaacatacattatacaaagtagcaaaccagcaggtcatgaaatcaggaaactatgcattccgtgaccgccgtcagaaaaaacgtgatttccgtaagctttggatcactcgtatcaacgctgctgcacgtatgaacggtctttcttacagccgtttaatgcacggtcttaagctttcaggcatcgaagtaaaccgcaaaatgcttgctgatcttgctgtaaacgatcttactgctttcaatcagcttgctgatgctgctaaagctcagttagacaagtaagttgaaaaagccgctctctttccgggagcggtttttttacgtaaagggtgacaatcaatggctctcttcatttacgccgtattgataaacggatacggcttttggatcatgggcgctgataaaagaagagcaaaggcgcacaggtggagaatatcagagaaacgaatatggctcacagccgccatgttcggctcactcggcgtatggatcggcatgcgcaccttcaggcataagacgaagcacaaatcctttttatacggggtgccgctgctttttctcactgaagccgcccttgtgctcatgtatttgatgtataaaaaataaaaagcaggagagcttatcgctcgcctgcttttttcgcttttttgatgggctggtcccaatcaatcttgcaattcggataccgctccaatacctttttttcgacttcttcaaaatcatctgcagaaaagcggttcagcttttccggattttcggtccatacaaatattgtatggataaacagcggatgatctttggaagggatatgcttttctccttcaaagagcactcctttataagtaagctggagattttttcgcgtgtttttctgttcgtcaataaaataaaaattctcttttgattgcgccagtctgagccttcttttcgggtttgcgtaaaatttgacgcacatgtaaataaaataaataagaagtgcaagcaagacaatcctcaatactgtaatggccatatgtgtgaaggcacctcctcacctttgtcatgatctgatgtaatacgaaaaacaaaacaaaaagtttcatttttttaaaagaaatagataaaaacatttacccgtttttcaggcgaattaatcgtatgcttcagcattggttttgtataataagaagggtagtgaaaaaaaggaggtttattgatgacaaaattagatgaaacgctcaccatgctgaaagcgttaacggatgcaaaagggataccgggaaatgagagagaagtaagacaagtgatgaaatcatacatagaaccatttgccgatgatgtcacaacagaccggctgggaagtttaatcgccaaaaaaaccggcaaagaaaacggtccgaaaatcatgatctcagggcatttagacgaagtcggttttatggtgacgcaaatcactgataaaggctttctccgctttcaaaccgtcggcggctggtggtctcaggtcatgctggcccagcgcgtcaccgtcgtgacaaaaaaaggggacatcacggggatcatcggttcgaaaccgcctcacattctgcctcctgacgccagaaaaaaagccgctgatattaaagagatgttcatcgatatcggggcgtccagccgtgaagaagcaatggaatggggcgttcttccgggtgatcagattgtgccgtattttgaatttacagtgatgaacaatgaaaagcatttattggcgaaagcgtgggacaaccgtatcggctgtgcgattgccatcgatgtattaaaaaatctgaaaaacagtgatcacccgaatgaagtatacggggtcggaacggttcaagaagaagtcgggctgcgcggggcgaaaacagcggcacatacgatccagcctgatatcgcgttcggtgtggatgtcggaattgccggagatacaccgggaatttctgaaaaagaggcgcaaagcaaaatcggcgaagggccgcaaattattctgtatgacgcgtcaatggtatctcacaaagggctgcgcgaccttgtcgtaaacacggcggaagaagcgggaattccgtatcaattcgattccattgccggagggggcacggattcaggttctattcatttaaccgcaaacggagtgccggcgctgtccattacgatcgcgacgcgctacattcacactcatgccgctattttgcatcgggatgattatgagaatacggtaaaattgatcacagaagtaattaaaaaattagaccgggaaacggttgaccgtattacttatcaataaagatacggaagaatctgcttttttaagcagattcttttttttttgtctgtacaaatatgagccttgcgtctacaataagaaaagacatagaaaaatctgacaacatgtttttgaaagcgctttaaaaaaagggaggtttacaaatgaaaaacagattcagacgcatgatccgcttttcatgcgcagtcgttacagccggtctgcttctgatgtcttcatctccggcatctgccgcgttttggggggcatcaaatgaattgcttcacgatccgacaatggcgaaggaaggaaacacgtggtacgctttcggaaccggtttggaaggggagagggggcttcgcgtcttaaaggcgggcagcggcggcgtatggaccgttcagaaatcaatctttacttccccgctgtcatggtggggcaattatgtgccgaattacgggctgaatcaatgggcccccgatgttcaatattttaacggaaagtattggctgtattatgccgtttcttcattcggcaaaaatacctccgcgatcggtcttgcatcatctacaagcctcagttcgggaaactggaaggacgaagggcttgtcatccgttcgacaagcgccaataactacaatgcaattgatccggagctgacaattgataaagacggaaacccttggcttgccttcggttctttttggagcggcattaagctgacaaagcttgataaaaatacaatgaaaccgacgggatcactttattccatcgctgccagaccgaataacggcggagctttggaagcgccggccatcacctaccagaacggctactattacttaatggtgtcgtttgataaatgctgttcaggggtgaatagtacgtacaaaatcgcttatggaagatccaaaagcatcaccggcccatatctcgataaaagcgggaaaagcatgtctgaaggcggagggacgattcttgattccggcaatgaccgctggaaaggcccgggcggtcaagacattgtgaacgggaatattttagtgcgtcatgcgtatgatgccgaaaacagcggaattccgaagatgctcatcaatgatatcgattggagttcaggctggccttcctattaattgatcagccgggcatgtgtgtccggcttttttacttgcaataaaagattgacagtttgattcctccttaactataataaagttgttcgtacaaataaaagaataaaagttttattatttatattcgtacgtatatttatttaaaaatgcaagcgctttattttgatgggaaggggaaatgaatgtgcttcagaacaaagaatatgaattttggtttgtaacgggaagccagcacttatacggagaggaaacgctgcagcttgtcgataaacacgcaaagggaatatgtgacggtctcagcggggtgtcatcaagatacaagatcaggcataaaccggttgtcacgtcatctgaaacgatcagagaggttttgcgggaagcgcagtatcaagaaaactgtgccggggtcgtgacgtggatgcatacattttcccctgcgaaaatgtggattgaaggtctttccgcttttcaaaagccgatgcttcatctgcatacccagtatcatcgcgacatcccgtgggaaacgattgatatggactttatgaacagcaaccaatccgctcacggagaccgggagtacggatatatccagtcaagaatggggcagacgagaaaagtcatcgcaggctattgggatgatgaggaagtcaaacatgacatttcgcaatggatgaacacggctgccgcttggaatgaaagcaggaatattaaagtagcccggttcggcgacaatatgcggaatgtggcggttactgacggagacaaagtcggcgcccacattcaattcggctggcaggttgacgggtacggaatcggcgatcttaccgaggtgatgaacaatgtcaccgacgcagaaattgaggcgctttatgaggaatacgacaaattgtatgtcatcagcgacgaaacgaagcgggatgaagcaaaagttgcttccattaaagaacaggcgaaaattgaactcggattaacggcctttctcgaacggggcggatatacagcgttttcgacctcctttgaagttttgcacggaatgaagcagcttccgggtcttgccgttcagcgtctcatggaaaaagggtacggatttgccggcgaaggcgattggaaaacggctgcccttgtgcgaatgatgaaaataatggcggacggagaacaaacctccttcatggaagattatacgtaccattttgaaccgggtcgtgcgatgattctcggatcacatatgcttgaagtatgtccgacgatcgcccttgatcagccgaaaatcgaagtccatccgctctcaatcggagggaaggaagatccggcccggctggtttttaacggaatcggcggttcagccatcatcgccagcatcattgatatcggcgggcggttccgtctcattctgaatgaagcggaaggcagggaaattgatcatgatatgccgaatctccctgtggcgcgggtgctgtggaagccggagccatcgctgaaaacagctgcggaagcatggattctggcgggaggcgcccaccatacctgtatgtccttccggcttacggctgaacagatgcttgactgggctgagatggcaggcattgaaagcatctttatttcccgcaatactgaaatacatgagctgaaaaaagagctgaaatggaatgacgtattataccggctgggagggaattgatatggcgtatacgattggtgttgatttcggcacattgtccggccgggcggtgcttgtcaatgtccgcacgggcgaagaaatcgcgtctgcggtaaaagaatacactcatgccgtcatcgaccgcacgctgccgaagacgggtgaaaaactccctcgggactgggcgcttcagcatcctgccgattatatcgaagttctggaaacggcgattccgaacctgcttgagcaggcgggcgctgatccaaaagacgtgatcggcataggaattgatttcaccgcctgcacgattttaccgatagacggcgcggggcagccgctttgtatgctgccggaatttgaacgggagccccacagttatgtgaagctgtggaagcatcatgcggctcaaaaacatgcagaccgtttgaacacgattgccgaagacacaaaagaaacattccttaaaagatacggcggtaaaatttcttctgaatggatgatcccgaaaatcatgcaaatcgcggaagaagcgccgcatatatacaaggcggcagatcggattgtggaagcggcagactggatcgtctatcaattgtgcggttcattgaagcgaagcaactgcacggccggctacaaagcaatctggaatgaggagacggggtatccgccggatcattttttcgaaaagctcaacccgttaatgaaaacgattacacaggataaattaagcggcgcgatttattcagtcggggaaaaagcaggaggtttgaccgaaaaaatggcggagctgaccgggcttctgccggggacggccgttgccgtcgccaatgtcgacgctcatgtgtcagtgcccgcggtcggtattacagagccggggaaaatgctgatgatcatgggaacgtctacctgccatgtgctgctcggcgaggaagaacatatcgtccccggtatgtgcggggtcgtcaataacggcattttgcccggatatgcgggatatgaagcggggcagtcctgtgtcggcgaccactttgaatggttcgtcaaaacgtgcgttccgagagactatgagaaggaagctgaggataaacacatagacattcacgagctgctcagcaaaaaagcagcagaacttgttcccggggaaagcggccttctcgcgcttgactggtggaacggaaaccggtcaaccttggtggacgccgatttgacgggcatgatgctcggcatgacgctgcacacgaagcccgaagaaatctacagggcattgattgaagcgacggcgttcggaacgaggatgattatcgaaacgttccgggaaaacggcgttccggtcgaggagctttacgcagccggaggaatcgccgaaaaaaatccgtttgtcatgcagatttacgcagacgtcacaaatatggacattcaattatccggatctccgcaggcgcctgcactgggctccgcgattttcggagcgctcgccgcgggacgggaaaacggaggattctccaatattgctgaagcttgcgcgcatatggggaaattaaaagacggcttttatgccccgaaccgggaaagagctgagatttatgacagcttatatgcggaatataaagagctcgtacactacttcggcaaagaaaacaatgtcatgaaacgcctgaaagccattaaaaaccgtgattttgcgaaaggggggagccgccatgcttgaagcgttaaaagaagaagtgctcgccgccaatctgaagcttgaggaacataaccttgtcacgtttacatgggggaatgtcagcggcattgacagagagagcgggagaatcgtcattaaaccgagcggtgtcgattacagtgagctgaccgctgacaagctggtcgtcctgaatgaggacggagacattttggaaggctcgctgaaaccgtcttctgacacgccgacccatctttatctgtataaagcgtttccggctatcggcggaatcgttcatactcactcccgctgggcgacgagctgggcgcagtccggaagagacatacccgctctcggaacgactcacgcggattactttgaaagcgctataccctgcacgagggaaatgtatgaagaagaaattgtgaaagattacgagtatcatacaggcaaagttatagccgaaacctttcaaaacgaaccgtatgaacaaaatccgggtgtcctcgtccacagccacggcccgttctgctggggaacggacgcgctgaatgccctgcataacgccgttgtgctcgaaacggtagcggaaatggcctaccattcgcttatgctgaacaaacagctcagtccgatcgacagagtgctgcatgataagcatttttacagaaaacacggggcgaatgcttattatggccaaacttgacgcagccgggtttctgattgatttagacggaaccgtattcagggggcgggagctgattgacggcgcaaaagaagccgttcatacccttcagtcactgggcaaagccgttgtctttttaagcaaccgcggcaatctatcaaaagcaatgtgcagaaagaaactgctgggtgccggtatccgcacggatgaacggagcatcgtgctgtcctccagtgtgacggcatcatttttaaagaagcattatcctttgtcaaaggtctgggtgttaggagagaaagggctgactgatgaactcgctttagcgggtgtcgtcctggcgcaaaacccgcaggcggcagactggcttgtcatctccctgcatgaaaccgtcacctataaggatctgaatctcgcttttaaggcggcttcctccggcgcgcgcatcatcgccacgaacaaagaccgctcctttccgaatgaaggcggtcatgccatggatgtcgcgggaatgatcggggccattgaagcatccgccggagcaaaaacggagcttgtcatcggcaaaccgtcttggctgatggctgaggcggcatgtgaagcgctcggacttccccctgaggaatgcgccataatcggagacagcctcgaatctgatatcgcaatgggcaggctgtacggaatgaaaagcatattggttctgacggggtcggccaaacttggggagccccgtctatatgaacctgacatcgtccttgattctattaaagacctgacagaattagcgaaggagggaatccttttatgaaacgttctcctgaggacattcaatccgagtttgacaaggaaggggccagccgctcaccgattcaaatagaagatatcgtgatcggggcgaatgcaaaagaagagcttctcagatttctgcaaaaaaaatgctggaatcatccggtcatcgtctgtgaccggaacacgtacgaggcggcgggacgtctgcttgcggacgaattaagggcaggcggaatcaaagcgtcaaaagtcatcattccggagcatgaagccggggccgccgcggctgatgagaggacattggtctatacgctgatcaatctcgcggaagagacggatgttatcatagcggccggttcaggaacgattcacgacattacgcggtttgccgcttatcagcgcggattgccgtttatctcattccccaccgctccgtcagtcgacggttttacatcggcgggagcgccgctcatattaaacggaatcaaaacgacgattcaaacgaaagcgcccatcgccttatttgccgatacgaatgtattaaaagaagcgccccgttcaatgacagccgcgggcttcggagacatgctcgggaaaataacatcgctggctgattgggagatttcccgcaggcttgcgggtgagccgtactcagaagccggggcgaagcttgtgaaagacgcgctttggcagtgcattgatcaccgcgctgacattgccatgggaacggaggccggcattcagatactgatggaagcgctgatcgtttcgggtcttgtcatgcttgctcttgaccactcccgccccgcctcaggaggagagcatcacatctcgcattggattgagatggaaatgctgaaggcaaaacagcctccgattctccacggtgcgaaggtcggctgtgcgtgcgcggtgctgagtgatatttacaaagaactggcttgtcacgaaaagcttgctgaactgccgccgcactttcgcgaggcgattcagtccgcatatgaagggcttcccgacggcaaaacaattgccgggtggctctcatctgcgggaggtcccgcctgtttcgatgagatcggtgtaaaaaaggaccttgtcagcgatgcgcttaagcatgcgcacacactgcgagaccgttataccggtttaaccatcataaatgaaaatgcagcgctctttgcacatcatttgcatcaatagccgcacggcctaaagtggaaggggtaatgacatgaaaaaaacgaccgctgtatgtttggtgctgatgatgctcttcttgtttaccgccggctgttcacaagaacggactgccggccggccgggagaaacggagctgacgttttggacgtttaacggtctgcacgaacagttttatcaggaaatggtcaaagaatggaatcagaagtatccggatcgcaaaatcaagctgaataccgttgtttatccttatggacaaatgcatgataatttatcggtttcgctgatcgcgggtgaggggcttcccgatatagccgacgtggaattaagccggttctcgaactttctgaaggggaaggatatcccgcttgccgatctgacgccgctgattgaaaaagaccgcgataagtttgtggaagcgcgtctggccttatacagcaaaaacggaaaattgtacggccttgatacacatgtggggacgaccgtcatgttttacaacatggatatcatgaaaaaagcgggcgttgatcccgcctccattaagacatgggaagattaccggcgggcaggaaaaaaagtgcgtgaagccgctgggaaaccgatgggaacggttgaaacaaacgactccgccacattcctatccatgatttcgcagcaagggtcaggctactacagcaaaaacggaaaattgattctgaacagcaagacgaatacagatacactgaatgatgtaaaggacatggtaaatgataaaacccttctgccggctcccggcggcggccatcacagcgaagaatactacggttttatgaatcagggcggggcagcctcagtgctgatgcccatttggtacatgggacggtttatcgattatatgcctgatttaaaagggaaaatggcgatttaccctatgccggcctggaaagaaggcggtgacagatcagcgggtttaggcggaacagccaccgtcgtgccgaagcaggctgaacatctggagctcgcgaaagaatttctcggatttgcgaaaggttcaaaggaagggaacataaagctgtggacggtgctcggctttgacccgctccgctgggacgtgtgggattcaaaagaattgaaggagaaaaacaagtacacggatttcttccggaacggtacgtcaattttttcctcgctccttgaaataaaagatgagatcaatccgatttatctgcatgaagacttctctaaagcggctgatctcgttgtcagacaggtgctgttcgatgcgctgaagacgcaggaaaaaacacctgaggaagccttggacgaggcggcagagcaattagaaaaataggagaagccgccctatttaacagtgaaagcgggggagcttttatgagacctgtaaagacagagacagcgcaaaccgtttctgcagtccggaagaagccgcgccggcgcaatgtgctgtattcaaaaaaagcggcgccttatctttttacggcgccatttatcatttcgtttctcgttttctttttgtatccgatcatcagcgtgtttatcatgagctttcagcggatactgccgggagaaattacatttgtcgggttttccaattataccgctcttcttaatccaaccttttatacggcattatttaacacattggaatatactttctggacgctgatcgtgctgattccggtgccgcttcttttagcggtgattctgaattcgaagctcgtcaggttcagaaatgtgtttaaatcggctctgtttgtaccggctttaacatcgacgatcgtagcggggattattttccggctgatgttcggagaaatgaatacgtcgcttgcaaacgagctgatgatgaagcttggcgcatcaccccaaaactggctcaacaacaaaggtaccggcatgtttttaatggtgctgcttgcgtcatggaggtggatggggattaacattctttactttctggcgggtttgcaaaatgtgccgaaagaattgtatgaggcggctgaaattgacggggcgagtacgtggaaaaagttccggcatatcacccttccatttttaaagccggtgtccgtttatgtgttaacgatcagtatgatcggcggtttcagaatgtttgaggaaagctatgtgctttggcagaataattccccgggcaatatcggcctcacgcttgtcggttatttatatcagcaggggcttgcatacaacgaaatggggtacggggcagcaatcggaattgtccttttgcttgtcatcttactagtcagccttgtttcactgaaactgtccggttcgtttaaaggggagggataagcgttgcgtaacaatcacatgttttccgtgtacagagtcgcgtttaccttgttttttatcatgctgagcctgttgtatatctttccgatgatctgtctattgctcggttcattaaagccgtcatctgagctgatgcgcatcgggctgaatctgcgtcttgatccggatgtgatgagccttgataactacacctatttgttcaacggggggagcatttattttaaatggttttttaacagcctgctgctcggcgtcctcaccacggttctcacgctgtttttttcctctttgatcggctacggactcggtgtctacgagtttaaaggcagaaatattattttcgttcttgtgctgatcattatgatggtgcctcttgaagtgatgatgctcccgttgttcaaattgacggtgggtcttcatttaatcgattcttatacgggggtgattctgccgtttattgtgtcgcctgtcgccgtgttctttttccggcaatatgcgctcggacttccgaaggatcttcttgattcagcgagaatggacggctgcaccgaattcggcattttcttcagaattatggcgccgctcatgaaaccggcattcggagcaatgatcattcttcaatctttaaacagctggaataactttttatggccgctgatcgtgcttcggtcgaaagaaatgtttacgcttccaatcggactttcagggctgctgagtccgtacggcaacaactatgacatgctgatttccgggtccgtttttgcgatactgccggtgatcatcatattcttgttttttcaaaaatacttcatttccggcctcacagtaggcggagtgaagggatagagagagggaggaaatgtaatgaaaaaagcggggattacagcagataaagaatatatcatcggtgaagtggacaaacggatgtacggatcttttatagaacatatgggccgggcggtgtatgaaggcatttatgagcccggacacccgaaagccgacaaggacggtttcagaacagacgtgcaggagttaatcaaggaattgcaagtgccgttcatccgctatccgggagggaattttctctcaggctacaattgggaggacggcgtcgggccggtgaagaaccgcccgcggaggcttgatttggcatggcagacgacagaaacgaacgaagtggggacgaatgaatttttaacgtgggcgaaaaaagtgaacgccgaagtgaatatggcggtcaatctcgggacgagaggaatcgatgccgcccggaacctcgtcgaatactgcaaccatcctgaagggtcatactggagcgacttacgaaaatcgcacggatatgaaaaaccttacggcatcaaaacatggtgcttaggaaatgagatggacggcccttggcagatcggtcataaaacggcgcatgaatacggacggcttgccgctgaaacagcaaaggtgatgaaatggacggacccgacgatcgaattggtggcttgcggaagctcaaacagcggcatgccgtccttcatcgagtgggaggccgaggtgcttgagcatacgtacgagcatgtggattacatttcactgcatacgtattacggcaaccatgaaaatgatcttgagaactatttggcgaagtctatggatttagaccattttattaaatccgtcacagccgtatgtgattatatgaaagcgaaaaaacgcagcaaaaaaacgattcacctttctttagatgaatggaatgtgtggtatcactcaaatgaagcggataaaaaagtggagccatggattacggcccggccgattctcgaagacatctacaattttgaagatgcgctgttgatcggttcactgctgattacgatgctgcagcatgcggacagactgaagatcgcctgtctcgcccagcttgtcaacgtgattgcgcctatcatgactgaaaagggcggagaagcatggaggcagccgatcttttacccttacatgcacgcctcagtctacgggagagggacttcgatgaagctgctgatcacctccccgaaatacgactcggcggactttacggatgtgccgtatgttgatgccgcggccgtttaccatgaagaggatgaagcactgaccatttttgccgtcaacaaaagcaaggaaccgatggaaacggagatcaaactgagggggtttgaagattaccgcatcattgagcatatcgtgctggagcatcaggatatgaaagcaaccaatcaaaaaaacagaaaagaagtcattcctcactccaacggaacgtcttcggcaaacgctgaagggataacggcacattttactccgctgtcctggaatgtcatccgtttatcaggaaaataatgttccgaaaagccgggctgccgctgccggcttttttttacgcaaaaatcatctcctgttatctgataattatgataatatttagaaaaagagaaaaggggctgggattaaatgaatgcgattacaatcgtcatagcgtctatatgtattttggcgatcgcctatcggctttacggtacctttatgatggtcaaagtattaaaaatcaatgatcagacaccgactccggcccatgtgcttgaggatgggaaagattatgtgcccacgaataagtgggtgtcattcggccaccacttcgcggcaatcgccgctgccggcccgcttgtcggaccgattctggcagctcagtttggctatctgcccgggcttttatggctgttaatcggagcggtgatcgggggagccgtgcacgatattgtcgtattgtttgcatcaatgcggaaaaacgggaaaacgctttctgaagtcgccaaagaagagctcggcccggtggcgggcttttgcaccggtctttccatgctgtttatcattacgatcacgatggcgggtctgtccatggttgtgctgcacgcgcttgagaaaaacccgtggggaacgtttgcggtggggattacgattccgatcgcgatgggggtcggcctctactataaaaaaacgggcaatctcaaactcgcatcaactgtcgggtttcttttgttaatggccggtgttgtaatcgggccgcggctgcagacaacggctctcggggacatgctgacacttgatgcgaaaacgcttgcagtggcgcttcccgtctatgcgtttttcgccgcggcgcttccggtttggcttttgctggctccgcgtgactatttaagcagttttatgaaaatcggggtttttgccgctttgatcgcaggcgtctttttcgtcaatcccgccattaaattcccggccgtaacggagtttattcacggcggagggccggtgatcgcgggtcctgtctggccgtttatttcaataacgattgcctgcggcgccatttcgggctttcatgcatttgtcggttctggcacaacgccgaaaatgctggataaatggagtgatataaaaccggttgctttcggagcgatgcttgtggaatgtctcgtcggaattatggcgctcattgcagctgccgctcttgagcccgccgactattttgccattaacagcacgcctgaaatattccgcgccctcgggatgaatgtcgtccatctgcctgaattgagtaaagaaatcgggctcagtctggaaggaagaacgggcggagccgttacgcttgccgtcggaatgacgtatatctttacggagattccgtttttcagtcatttggcttcatacttttttcaattcgtcattatgtttgaagcggtgtttattttaacggcgattgatgcgggaacccgtgtcgcccggtacttgattcaagagtttttcggagaggtctataagccgctgaaaaaaacagactggctgccgggctcgattttctcaagcgcgctcgcctgcctgctgtggggctatcttctgtattcgggcgacatcagttccatttgggcgctgttcggcgtatccaatcagcttatggcatctgtcggcttaatcatcggtgcgaccgtcgtattaaaaatagcggataagcggcgctatatgctgacatgcctgattcctctcgcttatttgtacgtgaccgtcaactatgcgggttattggatggtgcggtatgtgtatttgaaccccgaagcggcgggatacaacgtgctgaatggcgttttatccattatcatgctgattctcgggcttgtgattatcattgcggctgtgaaaaaatgggcgaatgtatggcgtgatccgagtgccagactggaagcttcaatacccggataaatccgcggccgatccgaacattgtagcatcataaaggcagagagccgatcggtctctctgctttcggcttatgacaaatccgccgcttccaaaaggtaatccgccaaatgaaccgcgcggacacggcctgttaatccttcgcgtaaaatgccgagctgcatttgcagaaggcatccgggattggctgtcacgatgacggccgcctccgtttttccggcggctttcatcttgctgtctaatattttcatagacatttctgactctgttatattataaattcccgccgacccgcagcagctgtcggccttttccatttctctgtactcagcccctttaatgtttttcaaaagcgtgcgcggttcttctgacgtatgcatcacattgcggagatggcaggagtcctgatatgtgacgatatgaggagactgcgcccgcaggtttttttgatggaacttcagatcaaccagtacggatgaaaagtctttgagcttccggacgaattgttcggcacgttccgcccatccaggttcatctttcagtaaatgcggatattcctgaagaaaggcgccgcatccgccggcgtttgtaatgatataatcagcgtcaagcgcctcaaaagcggcgatattccgcttggccagttcttttcccatctctttttctccgctgtgcccgtgaagcgcgccgcagcacgcctggccgtccggaaccgcgatttcacacccggccgcctgtaaaagcgccgttgtcgcatgatttgttgctaaaaacatcgtatccattaagcagcccgagaaaaaagcggcccgtttttggacgggacccgcggcaggaagaaaacgcggcctttccttcatgtctttccgtttcggggcgggcgggagcacttgttccattgtgcgcagatgttcaggcaaaacgcgcagcataccggtttttctgatggcggtctgcagtcccgatctttggtatattccgagaagattcacggctgcctgcatgcggttttgatgagggaaaagcccggtgaaggcggctttccgcaagaggcgcacgccgggcttatgttttttattttgatgaatgatatccctcgcttcttcaagcagctgtccgtaattgacccctgccggacaaacgggctcgcatgcccggcatccgagacacagcgaaagtgagcgctcgacatcttcatccggttcgatcagtccgtctgtgacggctttcatcagggcgatccggccgcgcggcgaatgggattcttgaaatcctgattcgatataggtcggacaggaaggaaggcagaagccgcagcgcatacagttcagcaattcaccttcatccatgcggtttttgaattctgtttgaatgtgttgctgctctttagccgttgtcatttcatcatcaccacgcgtttccttgatgaattggcgaatatttttcccggattcagcagattttggggatcaagcgcttgtttgatcgctttcatggcggtaatgccttctgttttcagcttcatttctaaatacggcgcttttacgatgccgaccccgtgttcacccgttatcgtcccgcccagctcaatcgctttttcaaaaatggcggcaaaagctttttcgacacgttccatctcctctgtatttcggatatcggtggtgcacgtcggatggaggttgccgtctccggcatggccgaatgtgcagatggacaggccgtatgtttctgcaatctcgttaatggctttgaccatgccggcaatttgtgatctcggcacggtcgcgtcttccagaatcgtcgtcggtttcagccgggcaagggctgataatgcggaccgtctggcctctgtaagcgcgaatgcctcttcctcggtttcggccgtttggacggatacggctgctccgtttttacagatggcttcgattttttccatatctcgtctgaccgtttcgatgtcaccgtcctgttcgatcagcagcaccgcttttgcatcggtcggaagcccgatcttggcgtaatcttcaatgacctgcagtgtcggctgatccagaaattcgagtgtcgccggaatgattttttcagcgatgatggcagaaacagattccgcagccgcttcaatatgttcatagagtgcaagcagcgtttttttcgtttccggcttcggaaccagctttaaagtcgcttccgtcacaacgccgagcgtaccttctgatccgacgaaaagccgggtcagatcataaccggcgacatcctttgtcagcttccctcctgtgcggatgatatcgcctgaagccaagacggcttcaaggccgaggacataatcccgggtgacgccgtacttcaaaccgcgcagcccgccggaattttcattaatattcccgccgatcgtcgatattttcatgctgctcggatcaggcggataaaataaccctttcctttcaaccgcatgaatcatatcttgcgtgatcacgcccggctggacggttgccgtcaaattttcttcatcgatttcaagaatgcggttcatatgtttgaataaaagcacaagcccgccttcagacggacatgtgccgccgcataagtttgtgcctgaacccctcggcacgatcggaatgtcatgcctgctgcaaatcgttaatatacgggacacgtcatccgcgctgcggggagcgattaccgcatccggcatggcttgcagctgaggagccgcatcgtaagaatacacaagacggccagccgccgaatcatcataattctccttcccgaccgtccggatgaacgcttcttttgcctctcgtgaaatcatgttctccaacctccctgataagaaaagcgttttcatttaattgtaaagaaaaacgattcttcacactatggagaaacatatgaaaaatgatgatatgattacgtgctttttgtatgttgatctaaaaagcggagcgccaaataaaaagccgttatgtcttcggggcggtcaagcttcatatttgtcagtgattccagtttggaaagacggtagcgcaatgtattgatatgaatatgcatgtcgtctgcggtgcgctttaacgataattgccggtcgaaaaaggcgcgcagcgtatccagaagttcttcccggccgagtacatgctcgagaacccgccgtgaaaattccgacctcgtgccgggcgcgatatcggcaatacacatatccagttttaaatcttcttcaaagacggcctgcttgtcaccgattccggctgaaagtgctttatccgcctgttcgtatgattccgcgaggcgctctcccggaacgatccgtccgatgccggcggtgacaggctgcccaaaaacggcgccgatctttttgatgagctgtgttttggaagccgaatttgcttcatggttaatgagaatgcgttcatttccccagcggacaaacaggtcttcagggcattcgttctgccagagccgcccgagctcctccgctttatattgctcataacgtccttgaatgagtatgatccggcggtatgcgtgaaggtctgcgccgatgagctttgctttttctaaaaagcccggagaccattctttcagctgcagccaatcaaccataaaggattcaagcattctcgcacgccactgcgcttcttccatatggcgcgtttctttaataaacagctccgtcattttcctgagcaattctccgaaaggcaggatatcgtcagggtctcctgtcagaccgaacactccgattacctcatggcctgaaaaaacggggaggttcagtcctgcttttacgccctggaggcgtttttcatcttctttcgtaatgatgacattccgtttttcgcgggcgcagatcagtgcgccttcatgaaaccatccggcgcgcgcctcattggtgcccgcgatgatcatcccttttgtatcggcaataatcacttcgcggctgtacatatgtttgacttcggcaatcaatttctttgccagttccggctgtaactgcatggcgatccccctcgccattattatacaaaaaaaaccgggtgtgccatcacccggttcatgcttattgcgcaggttttaatccgccttcaagtgttttgagcatttcatttttttctgagtctgacgcatgctgccaaagaacttcgaataagacgccgaggcccggaagcattttttcttcaccgctttggatggcgtcaacgatagtatgctccagctgatcctggttattgccggttacattggcaataacggcgttgcgtaaattaagatccattacaaccgctcctttttcctgaatgtgatacgcatattcttaccgcgcacgcggtttattatgtgctgttcttgagatataataacaacatgcatgaaaaaaggagagcacagacataaagtgaaacgaatcgactctgcaaaaaaccaaaaagtgaaggactggaaaaaacttcacacaaaaaaagagagacttaaaacgaatacatttctgatagaaggagagcatctggcagaagaagcgctcaaatcaaagggaacggtaaaagaaattctcgtaaacgatgagagcgccattccggccgatctggatatgagcattccgtgctacgtgctgagcgaagacgcgttttcagccgtgacggaaacggaaacgccgcagcggatcgccgcggtctgccatatgccggataagcggcctgatcagctgaagcggctgcttctgattgatgccgtacaggacccggggaatttaggaacaatgatcagaacggcagatgcggcgggaatcgacgccgttgtccttggtgagggaacggcagacccgtacaacggaaaaacgctgcgttcagcgcaaggatctcattttcatattcccattttaaaacgtccgcttgatgagtttaccgccgagctgaaatcacaaggcgtcgcgatctacggcacggcgcttgaaaacggtgcggcttatcaaagcgtgaagcctgaagaatcgttcgcgttaatcgtcgggaacgagggggcgggagtggacgccggccttctgcaaaaaaccgatctcaatctgtacgttccgctgtacggacaggcggaatcgctgaatgtggcggtagcggccgccatcctcgtttatcatctcagaggataggttgcgaaaaaccttggatttcactataatagatagcaataatgtaaaaaccgtgacagaggacgtcaatttttgcacacgctgccttccagggagaaaatgccgctgactgagagcatttttatcgcagcacagaaattgattttcacctctcgagttgtcaccgggaccgcgccaaacgcgcgtaaaggtgaaccggaacgatcgtttccgttatgtcaatgaagctgtcggcagatgaagtctgccttaaaaagggtggtaccgcggccacaactcgtcccttctctcaaggggcgggtttttttgttttctgaaaaaggcatagaacggtttggtttacataaaaggaggatgcatgatggaagagaagcttaaacagctcgaactggaagctgcagaaaaagtagaagcggcgggttcattaaaagaagttaacgacattcgggtgcaatatctcggaaaaaaagggccgattacagaagttctccgcggcatgggcaaactgtccgccgaagagcgcccgaaaatgggagcgctcgccaatgaagtgagagagcgcattgcagcagccattacggcgaaaaatgaacagcttgaacaagaagagatgaataaaaaactcagcagccagacgattgacgtcacgttgccgggcagtcaggtaaacatcgggggacgccatccgctgacggtcgttattgaagaaattgaagatttatttatcggcatgggatataccgtcgaagaaggccctgaagtggaaacggattattacaactttgaggcgctgaacctgccgaaggaacatccggcccgcgacatgcaggacagcttttacattacagaagaaatgctgatgagaacgcagacgtcaccggtgcagacgcgaacgatggaaaagcataaaggaaaaggccccgtcaaaatcatttgtcccggtaaagtgtatcgccgcgacaacgatgacgcgacacattcccatcagttcatgcagatcgagggtctcgtcgtggaccgcaaaatcagcatgagcgacctgaaaggcacgcttgaattggtcgccaaaaaaatgttcggccaagaccgtgaaatcaggctccgtccgagctttttcccgttcacagagccttctgtcgaggtggatgtgacctgctttaagtgcggcggacaaggctgctccgtctgcaaaaaaacaggctggatcgaaattctcggcgccggcatggttcacccgaacgtgctgaagatggccggattcaatcctgaggaataccagggttttgctttcggaatgggtgtggaacgtatcgcgatgctgaaatacggcattgaagatatccgccatttctataccaatgatgtcagattcatttcgcagtttaaacaggcgtaagaggaggatacacatgtttgtttcatataaatggttagaagattacgttgacttgcagggaatcgacccggccgtgcttgcagaaaaaattacgagagccggtattgaagttgagggtatcgagtataaaggggagggcgtaaaaggcgttgtcatcggacacgtgcttgagcgtgaacagcatccgaatgccgacaaactcaacaaatgccttgttgatatcggtgcggaggaacccgtgcagattatctgcggcgccccgaatgttgataaaggacagaaggttgccgttgcaacggtcggagccgtgcttcccggcaatttcaaaattaaaaaagccaagctgcgcggcgaagcgtctcacggcatgatctgttcccttcaggagctcggcattgaaagcaagctcgtggcgaaagaatatgcggaaggcattttcgtttttccgaatgatgctgaaacgggagctgacgcaatggcggcccttcagcttgatgatgcgattttagaattcggcttaacgccgaaccgcgccgacgcgatgaacatgcttggcgtggcttatgaagtggcggctatcctcggcgcagaggtaaagcttccggaggcttcatatgaaaaagcggcagaaaaagcggcggatgctgtttccgtcaagattgaagatacgcaggccaatccgcattatgccgcaaaaatcattaaaaacgtcaaaatcggcccgtcaccgctttggatgcagacgaagctgatgaatgcaggcatccgcccgcataataacgtcgtggacattacaaacttcgtcctccttgagtacggacagccgcttcacgctttcgattacgaccggttcggttcaaaagaggtcgtcgtcagaaaagcggcggaaaacgaaaccatcgtgacgctggatgaacaagagcgcaagctgtcaagcagccatttggtcatcacaaacggaaaaaaagcgcaagccgttgcgggagtcatgggcggagccgagtctgaagtccgtgaagacaccactgcgattttactggaagccgcttatttcgacggacagaccgtccgcaaagcgtcgagagacctcggactgagaagcgaagcgagcgccagatatgaaaaaggcattgatccggcccgcgttttgctggcggctgaacgggcctgcagtctcattcaggcatatgccggcggagaagtgctctcaggcacggttgaagaaaaccatctgaaaatcgaagcaaacaacattcacgtgtctgttgaaaaagtgaacgccgtgcttggcatggcaatcgctaaagaagaaatcatcagcatttacaagcgcctcgggtttgcagtcagtgaagctgaagacgttctcgtcgtaacagtgccgtcccgccgcggagatattagaatagaagaagacctgattgaagaagcggcgagattgtacgggtatgacaatattccgtccacgcttccggaaacggccggcacgacaggcggcttgacaccgtatcaggcaaaacgccggaaagtgagacgtttccttgaaggagcgggtctttcacaagcgaccacttattcattaacgaatgataaaaaagcggccgcttttgcgatcgaaaaatcattcaacacgatgcttgctctgccgatgagcgaagaaagaagcattctcagacacagtctcgtgccgaatcttcttgaagccgtttcatacaatctggccagacagactgattccgttgctttatatgaaacgggttctgtatttctgacgaaagaagaaaacacaaaaccggttgaaaaagaacgggttgccggagctgtaaccggattgtggcgcaaaaatttatggcagggtgagaaaaagccggttgatttcttcgtcgccaaaggaatcgttgaaggcctgctgcatcaattgaatgtgtcagatcgggttgaatttgtccagtctgcacgcaaaaacatgcatcccggccggacggcaaacattctattgaacggttcgcttgccggatttatcggccaggtgcatccggcaatggaaaaagagctggatatcaaagaaacgtatgtgttcgagcttgatctgcacgcgcttctgaccgaggaaacagaacctgtcgtgtatacgccgattccgaagtacccgtccgtcacgcgcgacattgcgcttgtggcagataaaaccgttacaagcggacagctcgaagccgtgatcaaagaagccggcggcgcgctgctgaaagaagtcaccgtatttgatgtgtacgaaggtgagcatatggaagagggcaaaaaatccgtcgccttctcgctccaatatgttaaccctgaacaaacattgacagaagaagaagtgacaaaagtacatgaaaacgtgctgaaagcgctggaagaaacgtatcaggcggtattaagaggataaagaaaaagcttgcagatcattctgcaagctttttttattatgaccgtttccgttctacaaggcgtttcgctttttgcgtattggcaaaatgaagtttggtgaacgttctgagcgcaccttctcccttattgatgatcagcttggcggcagcttcatcgacgtgcggccccgcgccttttggaatcgtcatcccagcctcacgggaaagcttatccatttcaattaagaaagaatatcgcgcaatgatagaggctgcggcgacggaaagatgtatgctttccgctttcgtgctgaaaaacgttttttcttttacgatatcccgtccggaaagatgcttaaaataaatgccgggctctgcaaattggtcaatcagaatcgcttccggtttaacgccgttcatttttctcagcagattggaaatcgcctgattatgaaggagcgccttcatttttccttggctcatgcctttttcctgcatctgattgtatttttcgtttttcaacacaagcaggctgtaaggaatggttttaattaacagtttggcgatttcaataatctgcggatcttttaaatccttcgaatccttcacaccgagttctttcattaaagaaagctttgttttgtcggcgtaagcgcaggcaaccgttatcggcccgaagtaatcgcctgttccgacttcatcagagccgatcactgacatggaggcaatgcccgccgggggagcgtaaagcggatcggccgcttttttgacggttttctttgccttcggcgcctcagccgttccccagcgggccgcttctgtgccggcgttttttccctgaaagagaaccttgcccgagcggtaggctgtaatggtacagcccgggggcttggcctggaagacggcgccctgcggaacggcgggagtaagggagccggcataggattgtttcatttgttccatagcggaagcggatacttttataacagaatgggacacgatataatctccttttttggcacttttcactgtatataccagtgtatcataacagcccgaggcttgtctttccattcaaacgataatcgtggtatgataggaactaggattctcgcggaatggaggagaaacgttgtctgacggcaaaaaaaccaaaacgacagtaaacatttacggccagcacttcaccattatcggggaagaaagcaaagcgcacatgcgccatgtggccggaatggttgatgataaaatgagagaaatcaacgagaaaaatccatatcttgatataaataagctcgctgtattgactgcggtcaatgtcgtgcatgattatatgaaactgcaagaaaaatatgaaatactggagcggcagcttaaagaaaaggaatgaacaccatatgatagatatcatcatcttagttctgctcttaatgggcacattgcttggattaaaaagaggatttatcctccaatttatatacttgacgagtttcatcctctcgattgcgtttgcggcgcttttttacaaaaacctggccccgcatctgagctttatacccgcccctgatttttccggcgggcaggcggctctgtcttttattaaaggaaacgtggagacggcttattacaacgcgatcgcgtttgtcattttgtttatcatcgcaaagatcctgctccggattatcggagcggcgcttaatatcatcgccggcattccggtcattaaacagatcaacaaactgctgggcggggtgcttggatttctggaagtctatttatttgcgtttatcctgttatacgtcgcatccgtactgccggtaagcgtgcttcaggatatgctcgcacaatcgacgcttgcaaatatcatcacacatcatacgccgtatctgtcggggctcctgcaagaactgtgggcccagtacggggcataaaaaacttctcttgaccggagaagtttttttcaagctctgcgtcagttgtgccggaagagaaaaatttgtatgatgaaaagcaggaaacgactgggggttaacagtatgcataaaaaagatatcatcaggctgcttgaaacgattgcggtctatatggaactgaaaggggacaacccgtttaaaatatcagccttccgaaaagcggcggcggcgcttgagcaggatgaccgcagcctgtcggaaatcgacgacatgatgtctttatccggaatcggaaaaggcacctacggcgtcattcgtgaatatatgcaggaaggtgtgtccggcacgcttctccaattgcagaaagaagtcccggaaggcttggttcctcttttgaagcttccgggcctcggcggcaaaaaaatcgccaagctgtaccaggagcttggcgttcatgacgcggaatcgctgaaagaagcatgcgagcagcaaaaagtacaggggctcgccggtttcggcaaaaaaacggaggagaaaatccttcaggctctcggagaagccggaaaacagccggaacggtttccgatcggctatgcgctcagcattgcttcagtcattgaagaacatttggcccggctgacggatattcagaaatattcccgggccggcagtctcagaagagcgcgggaaaccgtaaaagatctggattacattatcgctacagatcgtccggaggctgtcagagaacagcttctttccctcccgaacgtaaaagacgtgatagcgggcggggatacaaaagtatcggttatcctgacctttgaatacgagacgagtgtggatttccggcttgtgacagaggaacagtttgccaccacactgcatcattttaccggttctaaagatcacaacattaaaatgcgtcagctggcgaaagagcgcggtgaacggatcagtgaatacggagtagaaaccatagaaacgggagacgtcaaaacattcccgagcgaagaagcgttttacgcccacttcggtctgccgtttattcctcctgagctcagagaaagcgggcaggaggtcgacacgtaccgggaagaaacggaccttgtggagcataaagcgataaaaggcgatctccacatgcactcagcctggagtgacggcgctttttccatcagagaaatggcagaagcgtgtatggcaaaaggctaccagtacatggcgatcaccgaccattcccaatatttaaaggtagccaacgggttaacggccgaacggctcagaaaacaggcggaagaaattgacgcgttaaacgctgaatttgaaaattttcatatttttaaaggcgtagaaatggacattctccccgacggttcgcttgattatgatgacagcgttctgtctgaaatggatcttgtcatcgcatctattcattcaagcttcagccagccggagcatgtcattatgaaacggcttgaacaggcgctgacgaataagcacgtggacattatcgcccacccgacgggacgcctgatcggcagacgggccggctatgaagtcgacatcgacatgctgattgagctcgcagccaaaacaaatacggcgcttgaactgaatgcaaaccccgcgcgcctcgatttacggactgagcatctgatcaaagcaaatgaaaaaggtgtgactttggtcattaataccgatgcccataatatcgagatgctcgatgatatgaaaacgggcgtgaccgctgcgcgcaaaggctggacagagacaaaacatgtgttaaacgcccggccgttacatgaggtcaaagcatttctgacgcgcaatgattaagtaaggaggaccataaaaccgtgcagcaaaaagtgttatcatcacttgaatttcataaagtaaaagaacagattaccgcacatgccgcctcatcgctcggcagggagaagcttctgcagctgaaacctttgacggatctcgccgacatccaaaaacagctggatgaagtcgaagaagcatccgcggtcatgcgcttgcgaggccatgctccgttcggcggcctgaccgacataagatccgctttacggcgggcggaaatcggcagtgtgctgacgccggcggaattcaccgaattgtccgggctgctgtatgccgttaaacaaatgaagcattttatcagccaaatgacagaagacggcgtcggcataccgctgatacaggcccatgcagaagagctgattacattaggcgatttggaaagggagattaactcctgcattgatgaccatggtgaagtgcttgatcatgcgtctcccgctttaaggggaatccgcacgcagctcaggacgcttgaatcaagagtcagagaccggcttgaatcgatgctgcgttcatcttccgcttctaaaatgctgtctgacaccatcgttacgattcggaatgaccgctttgtcatcccggtcaaacaggaatacagatcaagctacggcggaattgtccacgatacatcttcatccggtgctacactgtttattgaaccgcaggcgatcgtagatatgaacaactcgcttcagcaggcgaaagtaaaagaaaaacaggaaatcgaacggattctccggatgctgacggagcatacggctgaacacacacaagaaatcgctcaaaatgtggaagtgctgcagacactggatttcattttcgccaaggcgagatacgcaaaagcaatgaaggcgacaaaaccattcatgaacggagacggctttatccgtctgaaaaaagcgcgccatccgctgctgccccaagatcaagtcgtggccaacgatattgaactgggcggagattattcaacgatcgtcatcacgggaccgaatacgggcggtaaaaccgttacgttaaaaacactcgggctgctgacgataatggcgcaggcaggattgcacataccggctgacgagggctcggaagcagccgtatttgacaatgtgtttgccgatatcggcgatgaacagtcgatcgaacaaagtctgagtacgttctcatctcacatggtcaatatcgtcaatattttaaaagacgtgtctgaaaacagtcttgtgctgtttgacgaactcggtgccggaacagatccgcaggaaggggcggcgcttgccatgagcatccttgacgaagttcaccggacaaacgccagagtgcttgcgacaacccattatccggaactgaaagcatacggatataacagacaaggcgtcatgaatgccagcgttgaatttgacattgaaacgctttcgcctacctataaacttctgatcggagtgccgggccgaagcaacgcatttgaaatctcaagacgccttgggcttccggagcatatcatcggccaggcgaagtcagaaatgaccgccgaacataacgaagtcgatctgatgatcgcatcgcttgaaaaaagcaaaaaaagagcggatgaagaactttctgaaaccgaatcactcagaaaagaagcagaaaaactgcacaaagagcttcagcagcaaatcattgagctgaatgcccaaaaagataaaatgatggaagaagccgagcggaaagctgcggaaaaactggaagccgccgcaaatgaagccgaacagattatccgcgagctcaggtccatcaagcaagaacacagatcctttaaggaacacgagctgattgacgccaaaaaacgtctcggagacgcgatgccggcttttgaaaaatcaaagcagccggaaagaaaaacagagaaaaaacgcgagctgaagccgggcgacgaagtaaaggtgctcacattcggacaaaaaggggcgctgcttgaaaaaaccggcgagaaagaatggaacgtccaaatcggcatccttaaaatgaaggtgaaggaaaaagatcttgagtttctcaaatcggctcctgaaccgaaaaaagaaaaagcaatcaccgccgtaaaagggaaggattatcacgtatcccttgaacttgacctcaggggagagcgttacgaaaacgccctcagccgcgtcgaaaaatatttagatgacgcggtgctcgccggctatccgagagtgtccatcattcacggaaaaggcacgggcgccctccgaaaaggggtgcaggatcttctgaaaaaccaccgcagcgtgaaaagctcgcggttcggggaagcgggagaaggaggatcaggcgtaacgattgtcgaactaaaataaaaagggagaaaacgtcatgaatgctttttgggaaaatgagcttgttgaaatcgcggcttattacagtgttgccgtcttgtgtctcgtcatttttctgaccgtgtttgaattggtgacatcctataaaaactgggtggaaatccaaaaaggcaatcttgcggtggcaatggcgaccggagggaaaattctcggtatcgcaaatgtctttcagcacagcatcgcccagcataattcgcttttgcaaatgatcggctggggcgtatacggatttattatgcttttaatcagctattttatctttgaatttctgacgccccggtttaaaattgataaagaaattgaaaaagataacagagctgtcggctttatttcatttgtcatctcagtcggcctgtcatttgtggtggccgccgggatttaaggggacggggaaaaatggagaagcttgcgaaagtgctgctgtcggcagcggggatttttctgttcatcggacttatttatctggtcatgacatcttaatactgaaaaaaggctgccgaactcaaatcggcggccttttttattgagaataccagtttatgcaggccgtatcagagcaaatgacggcttcccaattcatggcgcggacgacagactgaatgtcttgttcttccatgagaaagagtgtcgtaaaagaatcatatatgctcataaaagcggcgcgccgttttttcatcggcaatgatcatgtcagcccgcagcagtccgcatacatccgaagccgccgtttgattgagtgaaaataggcctttctcttcgacaggctcataataagtgcagcgctttatgccttttgaacggaacacatccaaaagtcccggaatcaaaaatggcgaagtgacatcatcgctcggcaagtacagatcgggatgatggagccgatttaaccgctcggcggattcaggatgtgcatattcctcccgcaatgccgtgacagcagtcataagcgcaagcgccgtttctttttcagaacgcaggccgcaaatgctcatgacggtttgccaggaaacgggtctgcccatcgcgatgatctcctcatcactcggatacatatgttcataaggccgtttgcgcttttgctcttcccgaccatctggcatccggacaaagggatggagcaaaaaggcggccgacgtaatcggcttcggcagctggcgcaggataggaactcccccttcaaaatgcagcgtttccagaaaactcaacacctcctgaaactcgaaatttcccatgaaacgctttcccattccaatcacccttctgctataataatagcgtataggaaaacagaagggagaggtattatgcagtctgaaaagccatggctttctcaatatcccgaagagattccgcatgagcttgaatttaccgatcaaaccctgccatccaatctgacaaactccgcagctcaattcccgaaccataccgccatttattttctaggaaaaaaactcacattccaagacgttctcacagattcattaaagcttgccgcttttttacgcaaaacaggcctgaaaaaaggtgacagagccgccattatgctgcccaattgtccgcagtcggtcatcgctttttacggcgtattgtttgccggcggcattgtcgttcagaccaatcctctctacacggaacacgagcttgagtatcagctgaaagacagtgcgccgcgcgtgatcatcaccctcgatatgctgtttccgaaagtgataaaaatgaaaacgttatcactcgtcgaacgcattattacaacaagtataaaagactttttgccgtttccgaaaaatatgctttatacgctcacgcaaaagcaacaggtgcatattgattatgacggctgcgaacaaattcacaaattagcggatattttaaaaaacgaaaaagcagaggaagcagagccatttgatattgaccctgcgcatgacatcgccgtgcttcaatacacgggcggaacaaccggctatccgaaaggcgtcatgctcacacaccgaaacattcaggccaatacagaaatgtgcgccgcctggatgtacaaaatgaaaaagggagccgaaaaggtgctcggcatcgtgcctttttttcatgtgtacggattgaccgccgtgctcaatttttccattatgcagggatgtgaaatgatccttcttcctaaattcaatcctttggatacactgaaaacaatcgacaggttgaagccgacggttttccccggggcgccgacgatttacatcgggctgctgcatcacccggagctgaataagtatgatctgtcctccattgaaagctgtccgagcggttcagcggcactgccggttgaggtcaaacagaaatttgaaaaagtgaccggaggaaagcttgtggaaggctacggattatccgaagcatcaccggttacccattcaaacttcatctggggaaaaaataaacccggcagcatcggctgtccctggcccaataccgatgcgggaatctattcagaagaaaaaggcgggcttgcggagccgtatgaacacggcgagctgatcgtaaaaggccctcaggtcatgaaaggctattggaataagcaggaggagacggcgcgtgtcatcagagacggctggctgtttaccggagatatgggatatatggatgaggaaggatttttctacatcgccgacaggaaaaaagacatcatcattgccggcggatacaacatttacccccgcgaggtggaggaggcgctttatgagcatgaagccgttcaggaaatcgtggtagcgggcgtccctgattcctacagaggggaaacggtgaaagcatttatcgttttgaaaaaaggcgccgaggcagatgccgatgagcttgatgcgtttgcaagagagcggcttgcgccgtacaaagtcccgaagctgtacgaattcagaaaagagcttccgaaaacggccgtcggaaaaatattaagaaggcgtttagtcgaagaggaagatgcttcccatgaaaacaaggtgccttaaaagaaaaacttgacaaaatccggattcctttttatcatgaagttatgaatgaatagtcattcatttatcgaaggaaggaacgatgacattgaaccaaaaacggccaaagtatatgcagattattgatgcagcagtagaagtcatagcggaaaacggctatcaccaatcacaggtgtccaaaatcgccaagcaggccggcgttgcggacggcaccatctatttatatttcaaaaacaaagaggatatactcatttctctttttaaagaaaagatgggccagttcattgaacgcatggaagaagaagtgaaagaaaaaacgacggcaaaagaaaaactcgctctcgttattaagcagcatttcacactgctcggcaatgaccgccacctcgcgattgtgacccagcttgagctcagacagtcgaatatcaagctgcgtctgaaaatcaatgatattttaaaaggttatttaaacatgctggacaccattttgaccgaaggaatcgagtcgggcgaatggaaagataatctcgacgtccgcctcgcccggcagatgatattcgggacgatagatgaaacagtgacaacatgggtgatgaacgatcagaaatatgatcttccggatttgtcagacaaggtattggagctgttggtgtcagggattcatcaaaactaaagggggttgacggatgaacagcctttcgatggcggtagaacaatctgttgcggtgatcaccattaatcatcagccggcaaacgcgctgtccggcgcggttttagatgagttgtccggtctgttcgaccgctgtgaaacagatgacagtgtcagaagcatcatcattcgcggagaggggaaatttttctcggcgggcgctgatataaaggaatttacgtcgcttgaaaatcttgagcaatcttctgccatggcggataaaggccagcagctgatggaaagaattgaagggtttccgaagcccgttatcgcagcgattcacggcgctgcgctcggcggcggccttgagcttgccatggcctgccatatcagaatcgctacattagatgcaaagctcggcctgcccgagctgaatctcggcattattccgggctttgccgggacgcagcggcttccccggtacgtcggtacggcgaaagcgcttgaaatgatcggcacttcagaacctgtaaccggagaagaagcgctcagcctcggtcttgtcacgataggcgccgaacatgaggaagagctgctgcaaaaagcgaaaacgctcgcgggcaagtttgcggaaaaaagcccgcagtcgatggcttttctgcttgagctcctttattcaaacaaggtctattcttatgacggcggcttaaagcttgaagcaaagcgctttggggaagcatttgcatcagatgacgcaaaagaaggcattcaggcatttctcgaaaaaagaaagcctcaattcggtgggcgaagataaaggggataagaatatgaatctatttgtactgatgaaacggacgtttgacacagaagagaaaatcgtcattgaagcaggaaagattcaggaggacggggccgaatttatcattaatccgtatgatgaatacgccattgaagaagccattcagctgaaggaagagcacggcggaaccgtgaccgccgtaaccgtcggcggagaagatgcggagaaagaactgagaaccgcccttgcgatgggctgtgaccaggcggtgttaatcaatattgaagatgatctgagcgatcctgaccaatactccgtttcaactatcttatatcattatttcaaggaccgggaatatgatctgattctcggcggaaatgtcgcgattgacggcggttccggccaagtggctccaaggcttgccgaactgctgaacattccttgcgtcacaacgattacaaaactgacaatcagcggcgatgaagctgcggcagagaaagacaacgaaggggataccgaaatcattaaaacctcacttcctttagtcatcacggcacagcaaggcttaaacgagccgcgctatccgtcgcttccgggcattatgaaggcgaagaaaaaaccgctggaagaacttgagctcgatgatctcggcattgatgaagatgatgccgcaccgaagctcaaaacgatcgaacgttttctgccgccgcaaaaagaagcgggcagactgatcgaaggagaagcctctgagcaggcgaaggagcttgtatcactgctgagaaaagaagccaaagtcgtataaactgatattaaagaaactgggggatgtcagaatgggaaaaaaagtgatcgtactcggagaaattcgtgacggcgccttacggaacgtcacctttgaagccatagccgcaggcaaaaccatttccggcggaggagatgtcatcggcgtgctgatgggaaagggcgcggctgatgcagcatcagaactcattcagtacggcgccgacaaagtatttacggccgattcgccggggctttctcagtatacggcggacggatatgccgcaattctcggggatttgatcgaaaatgaaaagcctgatgcggtcattttcggccacacttctatgggaaaagatttgtcacctaagcttgcggcccggtttgaaacggggctgatttcagacagcacagatgtaagcgttaccggagataacatcgtttttacaagaccgatctattccggcaaagcctttgaacaggtgatttcaaccgatcctttcattctggcgacaattcgtccgaataatattcaggcattagaaaaagacgcgaaccggacgggtgatattgaagagcttgcggcgcctccggcagatttgcggacggtcattgaagaagtagtcaaaaaaacggcggacggcgtggatttatcagaagcgaaaattatcgtagcaggcggccgcggtgtaaaaagcaaagatggatttgaaccgttaaaagaacttgccgaggtgctcggagcagcggtgggcgcttcgcgcggcgcatgtgacgcggactactgcgactattctcttcaaatcggccagacgggaaaagtcgtcacgccggatttgtatatcgcctgcggaatttccggagcgattcagcatttggcgggcatgtcaaacagtaaggtcatcgttgccattaacaaagacccggaagcggaaatatttaaaatagcggactacggaattgtcggcgatttgttcgaagtggttccgcttctgactcaggaatttaaaaatgccaatattcattcataatcaaaaccctctggcttatttgtcagagggttttggtttgtgttaattagttcgtacaaattatagattaataaaacaacagattgacatgtacgaaccaatgtaataagcttttgtaaagcgcttacaaacttatccatacagcatacatcccagatagatcggctgtagtgctttcattcttattaaggggaaggaatgatcaagtttgtctcacaatacggcagtcattcaaactgatatcacacggggaaccattaataaaaacatatacggacatttcgcggaacacctgggaagaggcatatatgagggcatctgggtcggaaaagattccgatattccgaataccggaggggtcaggacggatgtcgccgccgccctcaagcagcttcagattcccgtcctcagatggccgggcggctgttttgctgatgaataccattgggcaaacggcgtagggaaacgcaaaacaatgctgaatacccattggggcgggacgattgattctaatgaattcggcacgcacgagtttatgatgctttgtgaactgctcggatgcgaaccgtacatcgccggtaacgtcggcagcggaacggttaaagaaatggctgattggattgaatacatgacgtttgaagcgggcacgccgatgtccgactggagaaaagaaaacgggcgggaaaaaccgtggaagctgaaatatttcggaataggaaatgagaactggggctgcggcggaaacatgcatcctgagtattatgctggcctttacagaaacttccaaacctatgtccgtaattacagcggtaatgaaatctataaaattgccggcggcgcgaatgtcgacgattaccgctggactgaaactttaatgaaaaaagccgcggatctcatagacggactgagcctgcattattacacaataccgggcgacttctggaaggggaaaggatcagcgacggagtttacggaagatgaatggttcatcacgatgaaaaaagcggcgcatatggatgaattgatcacaaggcacagcgccatcatggatcagtacgatcccgaaaaaagagtcgggctgatcattgatgaatggggcacgtggcttgatcctgagccgggcacaaatccgggctttctgtatcagcagaatacgatccgcgacgcccttgtcgccgccgcgcattttcacatttttcatcagcacgcagaccgcgtacagatggccaatatcgcgcaaaccgtcaacgtgcttcaggcaatgatcctgacagaagggaaagaaatgctgttgacgccgacgtatcatgtgttcgatatgtttaaggtgcaccaggacgcatctcttttggcggcagaaacaaatgcagccgggtacgaatggaatgacggccggctcccgcaagtcagcatttcagcgtccaaacagcagaacggagacatacatatcagcatttgcaatatcgatcatctgcacaaagctgacgtgaagattgaactgcggggcatgaaaaagacagggacgccttcgggaacgattctgcacgcggaaaaaatgaatgcccacaatacattcagcagtccggaaaacgtcaaaccgaagccgttttccgggtttgctcaaaagggaggaaaacttgaggcggagcttcctccgatggcgattgtattaatcacgctgcctgcaggtccatcttaagttttgaacgcccgccgcccggttataatacactgtataaataagattatttccggcgggttcgggggaaaataatataagcattaaattagcatgaacgaatgggagatgctatactaaaaatcatcatttgacaattggaggaataacaaatggctatcgtaaaagcaactgatcaatcgttctcagctgaaacaagtgaaggtgtcgtattggctgatttctgggctccttggtgcggaccttgtaaaatgatcgcgcccgttcttgaagagcttgatcaagaaatgggagacaaactgaaaatcgtcaaaatcgacgtggatgaaaaccaagaaactgccggtaaatacggcgtcatgagcatcccgacacttctcgtgctaaaagacggagaagtcgttgaaacatctgtcggcttcaaaccgaaagaagctcttgaagagcttgtaaacaaacatctgtaagccgaaagcttccgttacggcagggcgattcctttgaaaggggtcgcctttttttgatcttccaaaagctgagaatggagaaaaacaaatgttcgtgatacactgaatggacacgagaaatgaatgtaaggaagggtaacgtatggataaacaactgaaagaaaagctggccctccttcccgatcagccgggctgttatttaatgaaagaccgtcagaaaacagtcatctacgtggggaaagcgaaagtcttgaaaaacagggtgcggtcttatttcaccggttctcacgacgcgaaaacccaacggctggtgacggagattgaggactttgaatatatcgtgacttcctccaatcttgaagcgcttattttggaaatgaatctgattaaaaaatacgatccgaaatacaatgtcatgctgaaagatgataaaacctatccctttattaaaatcacccatgaacgtcatcctcggctgattgtcacccggaatgtcaaaaaagacaagggacgctatttcggcccgtatccgaatgtgcaggcggcgcgggaaacgaaaaaactgctggaccgcctttacccgctcaggaaatgctcaaagcttccggaccgcgtctgtctttattatcatctcggccaatgcctcgccccatgtgtaaaggatatatctgaggagacaaaccgcgagattgttgaagacatcacccgttttttaaagggagggcataacgaaatcaaaaaagagcttgaagcgaaaatggcagaagcggccgaaaagcttgaatttgaacgggctaaagaattccgcgaccagcttgctcacatcgaatcgacgatggagaagcagaaaatgaccatgaatgaccttctggaccgcgatgtgtttgcatatgcctacgataaaggctggatgtgcgttcaagtcttttttatacgccaaggaaaactgatcgaacgcgatgtcagcatgtttccgatgtatcaggaagcggatgaagagtttctgaccttcatcggccagttctattccaaaaacaatcactttctgcctaaggaaattctggtgcctgacagcgttgacagggacatgattggcgagctgttggaaaccgccgtgcatcagccgaaaaaaggtccgaaaaaagagctgcttttgcttgcgcacaaaaatgcgaaaatcgccctgcgggaaaaattctcgttaatcgagcgggatgaggaacggtcaatcggtgcagccgaacggctcggcgaagcactgaatatttacacgccgcatcggattgaagcgtttgacaactccaatattcaaggcacaaaccccgtatcggccatgattgtctttattgacggaaaaccgaataaaaaggaatatcgcaaatataaaattaaaaccgtaacagggccggacgattacggctcaatgagggaagtcgtcagaagaagatacacgagggtgctccgcgaaaatcttccgctgccggatttaatcatcattgacggcggaaaagggcagattaacgcggcgcgcgacgtgctcgagaatgagctcggccttgatgtcccggtagcgggactggcgaaagatgataaacaccggacatcgaaccttttgatcggcgacccgcttgaaccggtgtttctggagcggaacagccaagagttttacctgcttcagcgcattcaggacgaagttcaccgttttgcgatcagctttcacagacagatccggggaaaaagcgtctttcaatccgttctggatgatatccccggaatcggcgaaaaacgcaaaaaaatgctcttaaaacatttcggatctgtcaaaaagatgaaggaagcaagccttgacgatatcaaaaaagccggtgtgccggccgcggcggcccagttgctgtttgaaaaattaaaaaaatagtattgtgcttttctgaaaaatctgctagaatgtgaactaatttcataagatcgtgttatatggtgaagatagaggtgcgaacttcaatagtaagcctttggagaatgatggattctgcgaaaaaggctgaaaggggagcgtcgccgaagtgtgtcacatcccatcggtgtgatttgctggccttgcattaaataaatgtaaggctgtcaagaattcattttcttggagggctatctcgttgttcataatcaatcgtactgatatgaaaagcaatgagagctattcctctcattgctttttttattgtggacaaaacgctcttttctcctcacccgcacgaaccaaaatgtaaagggtggtctagtatgggtcttatcgtacaaaaattcggaggcacttccgtcggctctgccgaaaaaattcaaaatgccgcaaatcgcgccattgctgaaaagcaaaaaggccatgatgtcgtagtcgtcgtttcggcaatgggaaaatcaaccgacgcgctcgttaacctcgcggctgaaatcacatctgaaccaagcagacgcgagatggatatgcttttgtctacgggggagcaggtcacgatttcgcttttggccatggcgcttcaggaaaaaggatatgacgccgtctcttatacgggctggcaggcgggtgtccgcacggaagccgttcacggcaatgcgagaattacggatattgatatcacggcgattcgttcgcagcttgcagaaggcaaaattacagtcgttgccggttttcagggcgtaacggaagacggcggcatcacgacgctcggacggggcggttctgataccacggcggtcgctcttgcagcagcgctggaagcggataaatgcgacatttatacagatgttccgggcgtatttacgacagatccgcggtatgtccggtcagcgagaaaactggcggggatttcttatgatgaaatgctggaacttgcaaatctcggagcgggtgttcttcacccgcgggcggttgagttcgcgaaaaactaccaagtgcctttagaagtgcggtcaagcacggaacatgaagccggaacattaattgaggaggaatcatcaatggagcagaatttaatcgtcagaggaattgcatttgaagaccagatcacaagggtgtccgtcacgggccttgcaagcggactgacaacactttcaacaatcttcaccgcgctggcaaaacgaaacatcaacgttgacatcattattcagacacagtcggatgatggggaagcggatatttctttctcagtgaaaacggaagatgccgcccaaacggtcgccgtgcttgaagaatataaaaacgcgcttaactatgaaaaaattgaaaccgaaagaaaactggcgaaagtctccattgtcgggtcgggcatggtttcaaatcccggcgtcgccgcggacatgtttgccgtactggcggaaaaaaatgtacaagtcaaaatggtaagcacatccgaaataaaagtatcagcggttgtcagcgaaaatgatatggtgaaagcggtcgaagcgcttcatgatgcgtttgagctgtctaaacagccgtctgccgtataaacgggcaggcaaaaaggcgggacttttgagtcaccgcctttttcaattatacagggtccttcatatcccattttacagtcaggacgactttatccgctctcttttttacctgttcataagattctgcaatctgatcgttcatcaattgaatctgttcggctataaaaccggcttcaagctggaaacaaggctctttctgatgtttgagcctgctggatacgagcggtccttccagttcaaattccagttcttgttttttcgatcctgcgtttgtcaaagttccccagccggctttttcaaaaaaggcggggatttcttcccacgattgaagaggaaatttgcgggcgaggcgttttcccgcccaatacatcatcgatgaatgatccggaccgaggatatccggaagcacgatttcccggattaattcgtagccgtatgcgctgacgtcgagttcagttaaaggttctaaagctgcttcataattattcttcatattatgtattcccctctctccttcgtttattatagcttaaacaggggggaggattacaggatgatcctataaaacacgcgaaaaaatgtgagaaagatatcgcaggaaaataaaattttccctccagataatcaattccgaaaattataatttatgtacacgttttcttgacgcccttttgagggaggagtaaaatgaaattgtcaataaattttaataaagtgcttacaattgaaacgaagtgggggcagagattttagtacatttcgcacttaaatcaaacagggggtaaagtaatgtctgggaacagagagttttattttcgaagattgcattccttgctcggtgttattccggtcggcatctttttgatccagcatttagtcgtcaaccaatttgccgcaaggggagcggatgcgtttaacaaggcggccggctttatggacagtctgccgttcaggtatgcgttagaaatttttattattttcttacctttaatttatcatgcggtttacggtgtgtacatagcatttactgcgaaaaacaacgctggccactacagttatttcagaaactggatgtttgtgcttcagcgtgtcactggtattctcacccttattttcgtcagctggcatgtgtggcagacgcggattgccgcgcagatgggcgctgaagtcaacttcgatatgatggcgaatattctgagctcgccgtttatgctcggtttttacattgtaggcgttttatcggtcattttccacttttcaaacggcttatggtcttttgcggtcacatgggggatcacggttacgccgcgttctcaaagaatttcgacttacgtgacgctgattatatttttagcgctttcatacgtaggtttaaaagcgatttttgcgtttgtgtaagagaactagattactagagggagaggggctatcatgagtcaatcaagcattatcgtagtcggcgggggtctagccggcctcatggcgacaattaaagcagcggaatcaggcacggccgttaaattgttttccatcgttccggtcaaacgctctcactcggtctgcgcgcagggcgggataaacggagctgtcaacacaaaaggggaaggagactctccgtttgagcattttgatgacacggtatacggaggcgactttttggcaaaccagcctcctgtaaaagcgatgtgtgaagcggcgccgtccattatccacttattggaccgcatgggggttatgtttaacagaacgccggaagggctcttggacttccgccgtttcgggggtacacagcatcacagaaccgcttacgcgggagcgacgacgggtcagcagcttctttacgcactggacgagcaggtgcgcagatatgaagtggcgggtctcgtcacaaaatacgaaggctgggaattcctcggcgccgttcttgacgatgagcgcacgtgccgcggtatcgtagcccaaaatctgaccaatatgcaaatcgagtcattccgttctgacgccgttattatggcgacgggaggacccggaatcgtattcggaaaatcaacaaacagcatgatcaatacgggatctgccgcatcaatcgtctatcagcagggcgcttattatgcaaacggcgaatttatccaaattcacccgacagcaatcccgggggacgataaactgcgtctgatgagtgaatcggcgcgcggcgagggcggtagagtctggacgtacaaagacggaaaaccttggtacttcctcgaggaaaaatatccggcttacggaaacctcgtgccgcgggatattgcgacacgtgaaatctttgacgtgtgcgtgaatcagaaactcggcatcaacggagaaaacatggtgtatctcgatctgtcgcacaaagatccgaaagagcttgacgttaagcttggcggcattatcgaaatctatgaaaaattcatgggcgatgacccgcgcaagcttccgatgaaaattttccctgccgttcactattcgatgggcggactgtgggttgattatgatcagatgacaagcatccgcggactgttcgcagcgggtgaatgtgattattcaatgcacggaggaaaccgtttaggggcgaactctctgctttccgccatctacggaggaatggtggccggaccgaatgcggtgaaatatgtttccggacttgaaacatcagcggaagacctgtcttcttcattatttgattcctatgtgaaaaaagaagaagaaaaatgggccgatatcatgaagatggacggcgatgaaaatgcctacgtgcttcaccgtgagctcggagaatggatgacggccaacgtcacggtggtccgccacaacgacaagcttttgaaaacggatgacaaaatccaagagctgatggaacgctttaagaaaatcaatatcaacgatacgacaaaatggagcaaccaaggggcgatgttcacccgccagttctccaatatgcttcagcttgccagagtcatcacgctcggcgcatataaccgaaatgaaagccggggagcgcactataaaccggatttccctgaaagaaatgacgatgagtggctcaaaacgacgatggctaaacatgccggtccgtttgaagctccggaatttgaatatcaggatgtcgatgtatcactgattgcgccccgtaaacgcgactactcgaagaagaaggtggcgaaataatcatgagtgagaaaaagatacggtttatcattacacgccaggatacgcccgaaagcgcgccatacgatgaagaattcgaaatcaattaccgcccgaatctgaacgtgatttccgccctgatggaaatccgcagaaatcccgtgaatgcaaaaggagagaaaaccactccggtcgcatgggacatgaactgtcttgaagaagtatgcggcgcctgctccatggtcatcaacggaagaccgcgccagtcgtgtacggcgctgattgataagctggaacagccgatccgtctgaagccgatgaaaacattcccggttgtccgtgaccttcaggttgaccgcagcagaatgtttgattcactgaaaaaagtgaaagcatgggtgccgattgacggaacttacgatttggggccggggccgagaatgccggaaaaacgccgccagtgggcatatgaattgtctaaatgcatgacatgcggcgtctgccttgaagcctgcccgaacgtcaacagcaagtcgaaattcatggggcctgccccgatgtcacaagtgcgtctgtttaatgcccatccgacgggcgcgatgaacaaagcagaacgtttagaagctttaatgacagacggcggcctcggagattgcgggaattcacaaaactgtgttcaatcctgcccgaaaggcattccgcttacgacttcaatcgctgctttgaacagagataccaatttacaagcattccgtaatttcttcggaagcgacagagtataagaaagagaaaaagagcctcttccgcacgggagaggtttttttataaggagctgaaggtgatgaaacaaccgcaatatattgatatcccgtttgaagaatggagacagtcgttttctttctttactgaagtatcggttcgtttttcagaaacggatatgttcggccatatgaataatgtaacccctttcatctattttgaagaagcacggatcgcttattttaaacagcggggcatgacggcgcaaaactcggaaacgatgacggtcgtcgcaagccagcagtgcgactatatgcgtcaggtgatgccgtatgaaaatctgcggatttatgtgaaagcaagcgctgccggaaatgcgtccgtcacccttcattaccttggagaaaatgagtcgggcctgccgtgctttacaggttccgtcgttatggttcaagtgtcgaaaaaaagcggcaaagcggtcagctggacggagcgggagaaaggcattctgctcgcctgaacggataactatttctctaagagacgtcacctccgaagcgccctttacatatgatatcttgactatataaacccattcgtttcagattcgctctcaccttagcaaggagggttacaatacttgaaggagaaagattttcaatcaaagccgctgctgaccaaaagagaaagagaagtattcgaattgctcgttcaagacaagacaacaaaggaaattgcaagcgagctatttatcagtgaaaaaactgtacggaatcacatttcaaatgccatgcagaagttaggtgtgaaagggcgttcgcaagctgttgtcgagcttcttagaatgggtgagctagagctctgattcttgccggttttccttctttacgagaaggagccggttatttgcgttggcgcccgggctgatgggcatgcggtgaaaatcccggtttttcctttttctccgtcagtcttgcattttcttaaaaaaagaaggaaaatagacacggagcgcatagcccagaaagatccttgagtgagggatggacaaatgacatcaaaatctgtagagcatgttgcggatatcgaaaaatcactccgccatatcgctgcgatcattaaacaaaaaggaagagaaatccttaaccaatatgcaattacaccgccgcaattcgtggggcttcaatggctttatgaattgggggatatgacaataggcgaattatcaggcaaaatgtatttggcttgcagcacgacgacggatctgatagaccgcatggaaaaaaataagcttgtcgagcgggtcaaagacccggctgacagacgggtcgtcagaattcatcttctcgctgaaggagagcgcattatccaagaagtgattttgaaaagacaggcttatttgcgggatatgtttgcgacattttccgaagaagaaacagccgctttcgaaaaatcattattgaaactgcagcatgaaatgaaaagaaaatgaggcgattttgttggaacagccgataggagtcattgattccggggttggcgggttaaccgttgctaaggaaatcatgagacagctaccgaaggaaaatatcatctatgtgggagatacaaaacgctgcccgtacggcccgcgtcctgaagaagaagttcttcaatacacgtgggaaatgaccgattacctgctggaaaaccaccatatcaaaatgctcgtgatcgcctgtaatacggccacggccattgccttggaggatattcagcgcaaaacggatattccggttgtcggcgtcattcagccgggtgcgagaacggcgataaaggtcacgaaaaaccagcatatcggcgtcatcggcacggtcaataccattaaaagcagagcgtatgagcaggcgctgctcgggttaaacgcagaacttcaagttgagaacacggcttgtccgctgctcgtgccgtttgtggaaagcggacggtttcttcaggaatcagcggaggaagcggttgaagcatcgcttgaacctttaaaaggtacatcaattgacaccttgattttaggatgtacgcattatccgatcttaaaagacccgattcagaattatatgggagagcatgtgaaaatcatttcctccggagacgagacggcgagagaagtgagcaccatcttgtcttataaaggtttgttaaaccaatcgaaacatgcaccggagcatcaatttcttacaacgggagagcggaacggcttcgcaaaaattgccgaagactggttcggccacgaaatcggccatgtcgagtgcatctcccttcaagagccggtcagaaaataaatcaaaaaaaccccgctgtttacagcgggtttttttgcgcttcccggtctatttcccggacagggctcgtatacatcatagtacaaacagccttaggagggaaaagtatgctgaaaaaaggacctgcagtcattgctgcaacatgtcttacttcggcttttgtgttatctggatgcggtttgtttcaatccgataaaacagccggggaaattgacccgcctcaagacatttcatatgtaaaggatgaagcgggaattcaggcaaaaccaaagcagtcagagaaaaacggcacttctaaagccgaccagccggccaatacagtcatgcgagaactgtatctgattgataaaaacggctatgtcgcagcacagacactgcctcttccgaacagtgagggaaccgcaaagcaggcccttgagtacttggttcagggagggcctgtatcagaaatcctgccgaacggcttcagagcggtgctccctgcggatacgacggtaaatgtcgatattaaaaaagacggcactgcagtcgctgatttttcgaaggaatttaaaaactataaaaaagaagacgaacaaaaaatcctgcaatcgattacgtggacgcttacccaattcagctcaatagataaagtcaaaatcagaatcaacgggcacgaactgaaagaaatgcctgtgggcggcacgccgattacgggcgacttaagcagaaaagacgggattaatattgaaacggccggagtgaatgatctgacagacacccatccgctgactgtatattatctggcggaaacagagacaagcgaatactacgtgcctgttacaaagcggattgacaattcggaaacaaatgacatcaccgctgccgttgaacagctcaccgacggaccgggcaaagcaagcgggcttttgacggactttaataacgatgttaagcttctcagcaagccgaaagtgaaagacggccaggttacactggactttaacagctctatttacggaagcgccgacgaaaaaacaaaaatggtgtcatcgggcgtactggacagcatcgttctcacgttaaccgaacagccgtcgattaaaagtgtttctataaaagtaaacggaaaatcagaactggtgaatgaaaaaggagaatccctttcaaaacctgtttcgaggccggcacaagtgaatacgggtagtttttaatttgcgatttttgatatactagtaaaaaagaggttagcgttccggctgcctctttctttattcacaatccggaacaaaaggtttatgtacatataatcggaggtaaaatatgagacacgacggaagacagcacgatgagctgcgccctatcacatttgatttggattttatcactcacccggaaggctctgttttaattacagcgggaaatacaaaggtcatctgtaatgcatctgtggaagaccgggtgccgccatttttacgcggcggaggaaaaggctggatcacagcggaatacagcatgcttccccgcgcgacgaatcaaagaacgataagagaatcttcaaaaggaaaggtctccggcagaacgatggaaattcagcggctgatcgggcgcgcgctccgggccgtcgttgatttggagaagctcggcgaacggacgatctggatcgactgtgacgtcattcaagctgacggcggaacaagaacggcttccattaccggcgcattcttggcaatggccattgcgaccggcaaactcgtaaaaagcggcgttatcaaaacctctcccgtgacagattatctcgcggccatttctgttgggatggataaagaagaaggccttcttttggatctgaattatgaagaggattcggcggctgaagtcgacatgaatatcatcatgacgggaagcggacgttttgtagagcttcaagggacgggcgaagaagccacattctcccgtgaagatttaaacggactgttaagccttgccgaaaaaggaatccagacgcttattcaaaagcaaaaagaagtgctgggagaaacattgcctgaactgaaataagaaagagaggcctgatcagcgtgaaagaagtcattattgcgacacacaatcagggaaaagtgaaagaattcaaggaaatactcgaaccgaaaggctacagcgtctcttctttggcggaaatcggatttacggaagaaattgaggaaaccggacatacctttgaagaaaacgccatcttaaaagcggaagccgtggcaaaagccgtcaacaaaatggtcattgcagacgactccggtttatcagtggacaaccttggaggcagaccgggcgtttattcagcccgttatgccggagaagcaaaagatgataaggcgaatatggacaaggtgctgtcagaattaaaaggcatcgaaaaagagcagcgcacggcccgtttccgctgcgcccttgccgtcagcatgccggggcaggaaacaaaaacggtcgaaggtcatgttgaagggtatattgcagaaggacccgaaggagataacgggttcggctatgatcccatttttattgtaaaagataaagataaaaccatggcccagctgacaagcgctgagaaaaacaaaatcagccacagggctgaggcgctcaagaaactgtcaaagctgcttgattcataagggggagcgtatgcaatgaaagtgctgataataagtgacagtcacggccttgaagacgagctggagacgattgcaaagcggcacgaagacgaagcggatctgatgattcattgcggtgattcagagcttgacgccgcacatccggcactcacgccgtatcacaaggtgaaaggcaattgcgactttggcggcgggtttcaggatgaactccttctggatgccggttcaaagaaaattctggccgttcacgggcatcttcacggcattaaacagtcacttttaactgttttttaccgggcggaagagcttggggcggatatcgtctgcttcggccattcacatattgcggggagtgaagtgcttcggggcaagcttttgattaatccgggcagcatccgtcttccgagagtccgcaatgtgaaaagctatgccattcttactcttacagaaagagaaggcgccgtgacattttacgacgaaacgggtcgggaattgaaggacttggggaatacaatcagtttttaacaagtgatgggggagatttcattcttccccatcaaaagttttttaaaaaatattgacttatgatttgaacctgtatataataaatcttgtcgctgatacataaagcaaaagctgtcccagtagctcagctggatagagcaacggccttctaagccgtcggtcgggagttcgaatctctcctgggacgtacaaaaaaagagctggtgacatcagagtgaaaactgatgccgctggccttttttatcggatgactatattgtcaattcactgatatcatggtaaaataatcagcagatatttgtttttcatgtcccagtagctcagccggatagagcaacggccttctaagccgtcggtcgggagttcgaatctctcctgggacgtataaaaaacctcaagccctgacaatgggtttgaggtttttttgtattttatttttagttttacgaaacaaaagttccgtatttgatgaaaattgtaaagtaattttaatgtaaatgaaacttaatgtaatatttaccgtaataaatatatgtataaagatacttaaggcgcccttgagtgataaattatctgatttctatcatacgttttgttgatgattgatagaaagacagcaggaggaattagcttttgaagtacgcatttgcatataaaaatcacaatatagaaacgatcttttgcggaaaagacgagctgtttgaggaactgaaacaatttttaatcactcaatgcggtttaatcattgttgaggtttcaagggctgattactatacggagcaggaaatgaatcagtggaatgaacgttatactctgtgaataagaaaagaaaccggccgtgtgagaccggtttttgtatcatctgaatccgctcggagcgctgaagcccccggcatggccgctgaaaccgccaccgagcgcgccgggatgtgccccggcgccgaggcttccgccgacgtcactgaaggtttggccgtagtacccggatgtataagggtacggaacgaattgctgtccggcgaatgacagtgtgctttgcggggtctgctgtccgtatccggatggcggaaatccctgctgaaaagaagggccgccttgatatggtgctgtatgcatcggggccggaggatagtaagactgcggcggtaagaccggtaaaggcggaaatccaggaggcaggccctgcatgcctgataacatcttattcatgacatcactcatttcttacgagataagaacagtgtatgcgtatgtctgtataaagagcctgttcaatcgaacggaatatctgacaagcatgccggaaggacagagaaaaatcgcgtaataaaatgtgacatattcgtatatgaacggaaaaatttcatgtaatcttgagagattaataaaaaaaatataaaaacttttaacatttgccgatccttttatatcagtaatgaaagcgtatacaaaatagattgattaatctaaattgtctaataattataaaaatgctgttgacactgtctgcaaacgggcgtaatatgagttcaaacaaaaataaataaatgattcacactaaaaagaaaaatcataaaacactgaaaaaacaaacaaatgaaggttcttttttaataaaagagctgccataataaaaagcgcagaagaggataagtagctttgctgaagtttttcacagagagccggtaacgctgagagccggtaaaacaaatcaaagtgaactcccctcagagtgccggtctgaaatgtaaagagtaggactcggccgagtgaacgcaatgtttactcgttatcaaaacggataatcattatccatgagacggtctgcatatgaccgtaaacaagggtggtaccgcggagagcaaagccttttcgccccttttggctatcgcatgaaatgcttggctgaatgtgggtgggaaggcttttttatttgcgtcagccggcgctgcgttttatgaattggattttagaagggaacattgaaaaggaggaactgaaaatgggcacaaatgtacaggcggattctttgtctgccgattgtacaaaaacaatgaacggggctctgatgctgattgaatcattaaagaaagaaaatgtcgagatgatcttcggctatccggggggagccgtccttccgatttacgataaactgtatcaatcaggattggttcacatcctgccccgccacgagcaaggcgcgattcatgcggcagaagggtatgcgagagtctccggaaagccgggggttgtgattgctacctccggacccggagcgacaaatttagttaccggtcttgcggatgcgatgattgattcactgccgctcgtagtgtttaccggtcaggtcgccacttcggtcatcggcagcgacgctttccaggaagccgacattttaggaattacgatgccgattacgaaacacagctaccaagtccgccgtccggaagatctcccccgtgtgattaaagaggcgttccatattgccacgacgggaagaccgggcccggtattaattgatataccgaaggatgtcgcagcatttgaaggagaattcagatatgatcacgagatcaatcttccgggttatcagccggtaaaagagcctaactatctgcagatccgaaagctcgtggaagctgtcagcagtgcgaaaaagccggttattttagccggagcgggtgttttgcacggtaaagcttcagaagatttaaaaaattatgccgaacagcagcaaattccggtagcgcacacgcttctcggtctgggcggtttcccggcagaccatcctctttttctgggaatggcggggatgcacggcacatacacagcgaatatggcgctttaccactgtgacttgctgatcagcatcggagcgcggttcgatgatcgcgtgaccggaaatctgaagcattttgcaaaatcggccaaagtagcgcatatcgatattgatcctgctgaaatcggaaaaattatcgaaacgcagattccggtggtcggcgacagtaaaatcgtccttcaggaattattgaagcaaaacggaaaacagggacagacagaggaatggaaacagcagctttcagaatggaaagaagaatatccgctttggtatacagacgacagagaagagggcttgaaaccccaaaagctgattgagtatattcaccaattcacaaacggtgaggcgattgtggcgacggatgtcggccagcaccagatgtgggcggctcagttttatcctttccgaaaggctgataagtgggtgacctcgggggggctcggcacaatgggcttcggccttccggcggccatcggagcgcagctggccgatcgtaacgccacggtcgttgccatcctcggagacggcggttttcagatgacccttcaggaattagatgtcatccggcagctgaatcttcctgtcaaagtggttatcttgaacaacgaatgtctgggcatggtcagacagtggcaggaaatcttctatgaagaacgctattctgaatccaaattctcggcgcagcctgactttgtcaaattgtcagaagcctacggcattaaaggcgttcggatttcatcggaagaagaggcggaagaagagcttaaaaaggcgctttcatcaaaagaaccggccgttattgacgtccgggtcgccaaaagcgagaaagtattcccgatgatcgcgccgggtaaaggacttcatgaaatggtgggggtgaaaccttgaaacgcattatcacattaacggtggtcaaccgctcgggggtattaaaccggatcaccggcctgtttacaaaaagacactataatatcgaaagcatcactgtaggccacacggaaacaagcggtgtttcaaggattacatttgtcgtccatgtggaaggcgaaaatgacgtagagcagctgacaaagcagcttaacaaacaaattgacgtcctgaaagtgacggatattacaaaccaatcgattgtacagcgtgagctggcattaatcaaagttgtttccgcaccgtcggccagaacggaaatcaatggaatcattgagccgttcagagcttccgtcgttgatgtctcaagagacagcatcgtcgttcaggttaccggcgaatctaataaaatcgaagcgctcatagagcttctcaaaccttacggaattaaagaaatcgcgagaacgggcacaacggcttttgcgaggggaacccagcagaaggcgtcatccaataaaacaatttcaattgtataacacaaaaaagggagagattaaaatggtaaaagtatattataacggtgatatcaaagagaacgtattggcaggtaaaaaagtagcgattatcggttacggttcacaaggtcatgcacacgcgctgaacttaaaagaaagcggaattgatgtcattgtcggcgtcagacaaggcaaatcatttacacaggcccaagaagacggtcataaagtcttttcggtaagagaagcggctgcccaggctgatatcattatggttcttcttccggatgagcagcagcaaaaagtatatgaagctgaaatcaaagatgaattgacggcgggcaagtcattggtattcgcacacggatttaacgtccatttccatcagatcgtgcctcctgctgatgtggatgtattccttgtcgcccctaaaggacctggacaccttgtcagaagaacatatgaacaaggcgcgggcgtaccggcattgtttgccatctaccaggatgtatcaggcgaagcgaaagatacggctcttgcttatgcaaaaggaatcggcggagcgcgtgcgggggttcttgaaacaacatttaaggaagaaacggaaacggatttgttcggtgagcaggctgttctgtgcggaggtttaacggcgcttgtcaaagcgggttttgaaacgctgacagaagccggctaccagcctgaactcgcatacttcgagtgtctgcacgaactgaagctgatcgtagacttgatgtatgaagaaggattggcgggcatgagatactctatttccgatacggctcaatggggagactttgtatcaggaccgcgcgtagtcgatgcgaaggtaaaagaatcgatgaaacaagtattaacggatattcaaaacggtacattcgcaaaagaatggatcgtggaaaaccaagtgaaccgtcctcgtttcaatgcgatcaatgcaagcgaaaacgagcatcagattgaaaaggtcggcagacagcttcgtgaaatgatgccgtttgtcaaacaaggcaaaaagaaggaagcggtggtctccgttgcgcaaaattaatgttttcgacacgacccttcgtgacggtgaacaatctcccggggtcaacctcaattcccgggagaaactggcgatagccaagcagcttgaaagactcggggtggacattattgaagcgggatttcccgcttcatcccgaggtgattttttagccgtgcaggaaatcgcaagaacgattaaaaattgttcggtaacagggcttgctcgatctgtcaaaggtgacattgacgcagcctgggaagcgctgaaagacggggtcagcccgcgcattcacatctttatcgccacctctgacattcatctgaagcataagctgaaaatgacgcgggaagaggttaaggaaaaagcggttgaaatggtgaagtatgcaaaagaacgctttccgatcgttcaatggtcggcagaagacgcatgccgcaccgaacttccgtttctggctgaaatcgtagaaaaagtgattgatgccggcgcgagcgtcatcaacctgccggacactgtaggttacctgacgcctgctgaatacggaaacatctttaaatatatgaaggaacacgttccgaatatcagccgggtaaagctctctgcccattgccacgatgatctcggaatggcggttgccaactcactttcggcaattgagaacggcgctgatcaaattgaatgcgccattaacggcataggagaaagagccgggaacgccgcgctagaggaaatcgccgttgcgcttcatgtcagaaatgacgcgcatcaagccgattcatctctcaatcttcatgaattgaagcggacgagtgatcttgtcagcaaactgacgggcatggccgttccccgcaacaaagcaatcgtcggagataacgctttcgcacatgaatccggcattcaccaagacggtttcctgaaagaaaaatcaacatatgaaatcatttcaccggaacttgtcggcgtgactgctgatgcgctcgtactcggaaagcattccggacgccatgcgttcaaagaccgcctgaatgcgcttggattccagtttgatagtgaggaaatcaataaattttttacgatgtttaaagaactgaccgaaaagaaaaaagaaatcaccgatgatgacttgatttctcttattttagaagaaaaagtgacggacaaaaaaatcggctatgaatttctgtctctgcaagtgcattacggaacgtctcaggtgccgactgcaacagtctctttgaaaaatcaggaaaacgaacagctgattcaagaggcggcaacgggggcgggcagcgtagaagccgtttataatacgctcgggcgctgcatcgataaaaatattgaactgacagactaccgcatccaatccaaccggaaaggcgaagacgcgctggctcaagtttatgtcagagtgaccgtgaacggaaaagaaacatcagggcggggaatcgcgcaggatgttctggaagcttctgctaaagcttatctgaacgccgtgaatcggcagttggtgctggattgcaatttagacggattaaagagacggactgcggtcggctcgtaatagaaaggagaacgtttgatttgaaaaaacgcattgctttgcttccaggtgacggaatcggaccggaagtggcggaatcagcggcagatgtattgaaaagcgttgctgaacaattcggacatgaatttgaatttgaaaacgggctgatcgggggagcagcgattgacgcccatcaaaacccccttcctgaggagacggtggctctttgtgaaagatccgacgccatcctgctcggggcagtcggcgggccgaaatgggaccaaaaccctccggagctcagaccggaaaaaggcctgctcggcatcagaaaaaagctcggcctgtttgccaatctgcgtcctgtgaccgtatttgaaagcctgtctgaggcgtctccgctgaaaaaagaatatatcagcggcgtcgactttgtaatcgtcagggaactgacgggcggcctctacttcggagaaccgagcagacagtatgtcaatgaagcgggagaaaaggaagcggtcgatacccttttttataagaaagaagaaatcgcacgcgttgtcagagaagcctttaagatggctgccggcagaaaaggaaaagtgacgtccgttgataaggcgaatgtgctttcttcaagcagactgtggcgtgaaacggcagatgaaatcgcaaaagaatttcctgatgtgacgcttgaacatatgcttgtcgataatgccgcgatgcagctcatctacgctccgagccagtttgacgtcatcgtaactgaaaatatgttcggcgatattttaagcgatgaagcctccatgctgacaggctcgctcggcatgctgccgtcagccagtttatcaagttcaggtcttcacttgtttgaacccgtgcatggatctgcgcctgacatcgccggtaaagggatggccaatccgtttgcggcgattttatcagcggcgatgcttttgagaacatctttcggacttgaaaacgaagcgcaggcggtggaaaaggcggtcgcaaaggtgcttgcagacggcagccgtacacgtgatatcgcccgggacggccaatatgccggaacgcatgacattactgaaaaagtaaaagccgcattagccggctcgaatacaaaatctatagtatgacgctttaaagaaagcggtcttagttcaataggtagagggaggaaacaaagatgatgcctcgaacaatcatcgaaaagatttgggatcggcatgttgtaaaaagcggtgaaggaaaacccgaccttctctatattgatctgcacctcattcatgaggtgacgtctcctcaggcgtttgaagggttaaggcagaagggaagaaaggtcagacggccgcagaacacgttcgcgacgatggaccacaatattccgaccgtcaaccgttttgacattaaagatgaagtcgcaaagcgccaagtaaccgcgcttgaacggaattgcgaggagttcggcgtccgtcttgcggatcttcacagcgcagaccagggaatcgttcatgtggtcgggcctgagcttggtctgacacttccgggaaaaacgatcgtttgcggagacagccatacatcgactcacggcgcgttcggagcgcttgccttcggtatcggcacaagtgaggtggaacatgttctttccacacagacattatggcagcagcggccgaaaacgcttgaaatccgcgttgacggaacgctccaaaaaggagtgacagcgaaggatgtcatcttgtcggtcatcggaaaatacggggtgaaattcggtaccggatatgtcattgaatacaccggggaagtattcagaaacatgtctatggacgaacgcatgactgtctgcaatatgtcaatagaagcgggagcccgtgcgggactgatcgctcctgatgacacgacgattgaatactgtaaaaaccgtaaatacgcgccaaaaagcgaggaatttgaaaaagccgccgcagaatggaaagcgttaaaaaccgatccgggcgccgtatacgatcattccatcgtgttagacggcagcgagatttctccaatggtaacatggggtgtcaatcccggcatggttcttccggtcgatgcccaaatacctgcgccggaaacgattgattctgaagacggtaaaaaagaagccatccgcgcttacgaatacatggggatcgcgccgaatcaaaaaattgaagatattaaagtcgagcatgtgtttatcggctcctgtacaaattcacggatgaccgatcttcgccaggctgcggatatgatcaaaggccgaaaagtcgccgacagcgtcagagccattgtggtgccgggttctcaaagcgtgaaacagcaggccgaggaagaagggctgcaccgcgtgtttctcgaggccggctttgaatggagggaatcaggctgcagcatgtgcctcagtatgaacaatgatgtcgtgcctgaaggggaacgatgcgcttccacttccaaccgcaacttcgaaggcagacagggaaaaggcgcgagaacacaccttgtcagtccggcgatggcggcaatggcggccattcacgggcatttcgtcgatgtaagaaagttttatcaagaaaaaacagttgtgtaaggagtgcgcgaaaagatggaacctttaaaaacgcatacgggaaaagcggccgtcttaaaccggatcaacgtcgatacggaccagattattccgaaacagtttttgaaaagaattgaaagaaccggatacggcagattcgcgttttttgattggagataccttgagaacggtgagcctgatcctgaatttgaattaaaccgcaaagtctatgaaggcgcgtccatattaattgccggagagaatttcggctgcggatcatcccgtgagcacgctccttgggcgctggatgattacggcttcaaaatcatcattgctccgtcatttgccgatatttttcatcagaactgttttaaaaacggtatgcttcccatccgtatgccgtatgatcagtggaaaaaactcgccggtcaatatgaaaatcagtctctaaatatgacggttgatttggaaaaccagctcattcacgacagtgaaggaaaagagatttcatttgaagtcgatccgcactggaaggaaatgctgattaacggttatgatgaaatttcattaacgcttctgctggaggacgacattcagcagtttgaatcgaaaagaagttcatggcttcaagcctgaaaaaagccgcccggcatctgtccggcggctttttttaccgtgtgcatcatcctttcttgtgtttcatgacgcgtgttgatacacttgaacaaaataagcgcctgaaaggaaataaagtatgacgcatgacaagaaaaaagctgatatcattcctttcccccgtctgaaagaacgcttggttgataaagggatggccgccatgaaggataaacagtatgaggaggccctcgaactgttttcagaggcggtaagccacggcgataccgagtccgacgtacatttaggcatggcgatttgttttctggaactcggggaattggaagaagcaaaacaagtttgcgagaaaatgctgaatgaagggtacggccattatttcaccgtattgcaggtgtacatgaccattttaattcagctgaaacaatatgaagaagtcaaaagcacaattgaagctgtgctggaagaaaaccagctgcccgcagaaagtgcggagcaattctaccggctgctcgaattcagccgcaaaatgaccgatcccgatcagcaggaggaggcgtgggaggaggaatacgaggacattcttgatacggaaaaagtgctgaacagccccgctgaacaaatgaatctgattcattctcttaaagaccgcaatattgcaaaatacacgggtctcttaaaaacgattcttcaagatccgggcgcgcatcctcttattaagacaatgattttgacgctgatggccgagcacgactacagtaaaccggtccatattacaaaattcggcgattcaatgaccgcgataccgagtgaaacggtccagcctgatgcggctccgattttgcatcgcgttctccgggtgcttgatgaaacgctgggcaatgaaaaccctacattatatgctgccgtcgaggagctgtggagaagacatctgtacgtcctgcacccttttatgccgaagtttttgaacgcggatttatgggcggcggcgcttcataaggtcggttacgagatgcacggcattgacattgagccggaggaacttcatatgatgtacgagtttgacagccgcgaactcgaagaagcctgcacgatgattaaggatattgaagaaatttcttatttgtaaatcacaccatatagttgaaagcggtaggcgttatgttataatatagtggttgtatttatgtatagcggtttaactgaaatgagaattacggttggacaggctgccagttcattacataatgattctgattcaaagcggttttttctttgacaaagccgcggattgctttagaatggaagaccgacacaacctgaatagatttttggagggaaacacatgtctgtaaaatgggaaaaacaagaaggcaacgaaggcgtattaacggttgaagttgatgcggatacgttcaaaacagctcttgatgatgcatttaaaaaagtagtaaaacaggtttctattcctggattccgcaaagggaaagttccccgcggtttattcgaacagcgtttcggcgttgaagctctttaccaggatgctttagatattttacttcctgtagaataccctaaagcggttgaagaagccggcattgagcctgtagaccgccctgaaatcgatgttgaaaaaatcgaaaaaggcgaaagcttaattttcactgcaaaagtgactgtaaaaccggaagtgaaacttggcgattacaaaggcttaggaatcgaaaaagatgacactgccgttactgacgaagatgtacaaaacgaacttaaagcgcttcaagagcgtcaggctgagcttgtcgtgaaagaagaaggcgctgttgaaaacggcgatacagtcgttcttgacttcgaaggtttcgttgacggcgaagcgtttgaaggcggaaaagctgagaactactcacttgaagtaggatcaggttcattcatcccgggcttcgaagagcagttaacaggccttgaagcaggcgctgaaaaggatgttgaagtaacattccctgaagagtaccacgctgaagagcttgccggaaaaccagctgttttcaaagtgaaaattcatgaaatcaaagcgaaagagcttcctgagcttaacgacgaattcgcaaaagacattgacgaagaagttgaaacgcttgctgaattaaccgagaaaacaaaaaaacgccttgaagaagcaaaagaaaacgaagctgacgctaaattgcgtgaagagcttgttctgaaagcatctgaaaacgctgaagctgatgttcctcaagcgatgatcgacactgagcttgaccgcatgctgaaagaattcgaacagcgtctgcaaatgcaaggcatgaaccttgagctttacactcaattctcaggccaagacgaaaacgcgttaaaagagcaaatgaaagaagatgccgcaaaacgcgtaaaatcaaacctgactcttgaagcgatcgctcaagcagaaaaccttgaagtaacggacgaagaagttgaagcagagctgactaaaatggctgaagcttacaacatgccggttgaaaacatcaagcaggcaatcggttcaactgacgcgatgaaagaagatttaaaagttcgaaaagcaattgattttcttgtagaaaaccgttaatatggttcataataatagacataataaaacagggcgcgattaattcgtgccttgttttgtacaattatgatataactctttttcttggggcaagatagtcattgccgggctgtttttcgtcatacatatagaatgtgcaagtgcgaaacacattgttaccgtcttactggaaagtatggtaaaatgcaatacatactcgatcgtagcaagaaccgttttcttttgcccttcaggtaaaagaaaaagtgagacaagattaaggggtgaaagaatgtttaaattcaacgaggaaaaaggacaattgaaatgctcgttctgcggaaaaacgcaagatcaggttcgtaagctggttgcaggaccgggtgtatatatatgcgacgaatgtattgagctctgtacagaaatcgtagaggaagagcttggtacggaagaagaagtcgaatttaaagacgttccgaagccgcaggaaatccgtgagattctgaatgaatatgtcatcggacaggatcaggcgaagaaatcacttgcggttgcggtatacaaccattacaaacgcatcaattccaacagtaaagtggatgatgttgagctttctaaaagtaatatttctttaatcggaccgactggaagcgggaaaacacttcttgcccagacgcttgcgcgtattctgaacgttccgtttgcgatcgcggacgctacatctctgactgaagccggatatgtcggtgaggacgtagaaaacatcctcctcaagctgattcaggcagcagactatgatgtggaaaaagcagaaaaaggcattatctatatcgatgaaatcgataaagtagcgcgaaaatctgaaaacccgtccattacacgcgatgtatcaggcgaaggcgttcagcaggcgctgctgaaaattcttgaaggaacggttgcaagcgtgccgcctcaaggaggacgcaaacatcctcatcaggaattcatccagatcgatacgacgaacattctgttcatttgcggcggtgcatttgatggcatcgaacaaatcatcaaacgccgtctcggacaaaaagtcatcggcttcggctctgataataaagcggcagacctggaaaaagaagaactgctttctaaagttcttccggaagacctgctccgtttcggtctgattcctgaattcatcggccgtcttcctgtcattgcaagccttgagcagcttgacgaaacggcactggttgaaattctgactaaaccgaaaaacgcactcgtcaaacaatacaagaaaatgttagaacttgatgatgtcgagcttgaatttgaaggcgaggcattatctgaaattgcgaaaaaagcgatcgagcgtaaaacaggcgcacgcggcctgcgttctatcattgaaggcatcatgcttgacgtcatgtttgatctgccgtcccgcgatgatattgaaaaatgtgtcattaccggagcgacagtcgcagacggtgaagcgccgcgtcttgtattaaaagacggtactgttgtcggccaagataaaacatcagcataacacgacaaaacctcctgacccgaattaatcaggaggtttttttcttgtcctgacccttctgaaaatgtttattccgggctttgctgggagatactagcggacagaggaatgaattggatacataaatcgttttttcaggagggaccagcatgagttggacagggatcgcattatttgtacagctgtttttcgggatagtcatcggactatatttttggaatctgctcaaaaaccagcgaacacaaaaagtgacgatagataaagaatcaaaaaaggaaatggaacagctgcgcaaaatgcgcgccatcagtttatcagaacctttatcagaaaaggtgcggccgaaaagctttcaggacattgtcggccaggaagacggaattaaagcgttaaaagcagcgctttgcggaccgaacccgcagcacgtcattatttacggtcctccgggagtcggtaaaacggctgcggcgcggttggtattggaagaagcgaaaaagcataaacagtcaccgtttcaaaagcaggctgtttttgttgaacttgatgcgacgaccgcgcgatttgatgaacgggggattgccgatccgcttatcggttcagtgcatgatccgatttatcagggagcgggtgcgatgggccaagcaggcattccgcagccgaaacagggggctgtgacccatgctcacggcggggtattgtttattgatgaaatcggcgagcttcacccgattcagatgaataaaatgctgaaggtgcttgaagaccgaaaagtatttttagacagtgcgtattacagtgaagaaaatacgcaaataccgaatcacatccatgatatttttcaaaatgggcttccggcggatttccgtttgatcggagcgacaacgagaatgccgactgaaattcctccggccatccgttcgcgctgtcttgaagtatttttccgcgagctggaaaaggatgaacttaaaatcgttgcgaaaaaagcagccgacaaaattcagaaagagatttctgacgaagctctcagcgtgctgaccgcatatacgagaaacggacgtgaagccgtcaatatgatccagatcgctgccggcatggcggtgactgaggacagaaaagaaatcacgactgaagatatagaatgggttgttcattccagtcagctcacacctaaaaatgagcagaaaatcgccgatgaaccgcaagtcggcatcgtgaacggacttgccgtctacgggccgaacagcggcgcattgctggaaatcgaagtgaatgtcacacctgcgcaggacaaaggaagcctgaatatcacgggaattgcagaggaagaaagcatcggcagccaatcgaagtcgatccgccgcaaaagcatggcgaagggatctgtggaaaatgtgctgacggttctccgcacaatgggcatcaaaccttcagactatgacattcacgtcaattttccgggcggaggcccgattgacggaccttcagcaggtatcgcgatggccgcggggattttttccgcgattcaccgcatcccgatcgaccatacggtggcgatgacgggagaaatcagcctgacggggcttgtcaaaccgatcggcggcgtcattccgaaaattaaagccgcaaaacaggccggagcaaaaacggtcattatcccttatgaaaatcagcagtccattctgaaacgaatagacggaatcaccattaaagcggtaaaaacgttccaggaagtgcttgacgtcatattggttgaccctccttcagaacaaaaaccgtttgatatccaaatgaataaagaatccgtataaaccccatttttataatggggtttttttatggaggacatcttttcctttttcagaacagaaagaaagggtatactacgaagagactgttttatatacagggcaggcggataagccgattaaagcccgatcccggaattgtacaacgatgaaaaagttgtattataatggttcatactaaagtcacggaggtgtcagtcacatggcagaagatacaaaacgcagcatcccgctcctccctttaagaggcttattggtatacccgacaatggttttacatttagatgtaggccgtgacaagtcggttcaggctcttgaacaggcaatgatgcatgatcatatgatttttttagccactcagcaggatatttcgatagacgaaccgggtgaagaggatattttcgccgtcggcacttatacaaaaattaaacagatgctgaagctgcccaacggtacgatcagagtgcttgtagaaggaattcagcgggcgcagatccttgaatacaccgaactcgaagattatacttcggtcgatatacagctgatgcatgaggatgattcaaaagacgtggaagacgaagcgcttatgcggacgctgctggaccattttgaccagtacataaaaatttctaaaaaaatttccgcagaaacgtatgcggctgtgactgatattgaagagcccggcagaatggcggatatcgtcgcttctcatctcccgctgaaattaaaggacaagcaggacattctagaaacggcggatattaaagaacgtctgaataaggtcattcgttccattcataatgaaaaagaagtgctggagattgagaaaaaaatcggtcagcgcgtcaaacgttcgatggaacgcactcaaaaggaatattatttgcgcgaacagatgaaagccattcagaaggagcttggcgacaaagaaggaaaaaccggcgaagttcagtcgctcacggaaaagatagaagaagcaggcatgcctgagcgtgtcaaagaaacggcgcttaaggaattaagccgttacgaaaaagtgccgtcaagctcagcggaaagctctgttatccgcaactatattgactggctcatcgcccttccgtggtcggatgaaacagaagataaacttgatattaaaaaagccggggaaatcttagataaagagcatcacggcttagagaaagtgaaagagcggattttggagtatttggccgtgaaacagctgacgaaaacgctgaaagggccgattctttgtctggccggacctccgggagtcggtaaaacatctcttgcaaaatcaatcagtaagagcatggggcgcacttttgtgagaatttcactgggcggagtgcgcgatgagtctgaaatccgcgggcaccggcgcacatacgtcggggcgatgccgggccgtattatacaggggatgaaaaaagccggcaaacaaaatccggtctttctcctcgacgagatcgacaaaatgtcgtctgatttcagaggcgatccgtcttcggcgatgcttgaggtgctggatccggaacaaaacagcacattcagcgaccactatattgaagagacgttcgatttatcgaaagtactgtttatcgcgactgcgaataaccttgcttccatccctggccctctcagagacagaatggagattatcagcctgtcaggctacactgaaaacgaaaagctggagatcgtgaaagatcacctgctgccgaaacaaatcaaagagcacgggctcacaaagagcaacctgcagattcgggatcaggcgattacggacatcatccgctactacacgagggaagccggcgtgagaacgcttgaacgccagattgccgccatttgccgaaaggctgcgaaagccattgtgtctgaggagagaaaacgcattaccgttacagagaaaaatctggccgactatctcggaaaacggatattcagatacggacaggcggaaaccgaagatcaaatcggggttgtcacggggctcgcgtatacgacggtcggcggagatacgctgtcaatcgaagtgtcattgtcaccgggaaaaggaaagctggttctgacagggaagcttggagatgtcatgcgggaatcagcgcaggccgctttcagttatgtccgttcgaaagcggaacagttcggaatcgacccgaaattccatgagaagtatgacattcatatccatgtccctgaaggagcggtgccgaaagacggcccttctgccggaattacgatggccacggcgctcgtttcagcattaacggaccgtgcggtaaaacgcgaagtcggtatgacgggagaaatcacgctgcgggggcgcgtgcttccgatcggcggactgaaagaaaaggcgctcggcgcgcacagagcgggcctgaccactattattgcgcctaaagataacgaaaaagatatagaggatattccagaaagcgtcagagaaggactgaagtttatattcgtttctcacctggatgacgttttggaacatgccttagtaggagagaagaaatgaaagtcacaaagtcagaaatcgtgatcagcgcggtcaaacccgaacagtaccctgatggggggcttccggaaatcgcgctggcgggcagatcaaatgtaggaaagtcatcttttatcaattcattaatcaatcggaaaaacttggccagaacgtcatcaaaaccggggaaaacacagactttaaacttttacatcatcaatgatgaattgcattttgtcgacgttcccgggtacggatttgcgaaagtttccaaaagcgagcgggaagcatgggggagaatgattgaaacctatatgacgacccgcgaagagctgaaagcctgcgtgcagattgtcgacctcagacacgcgccgtctgctgaagacgtgaacatgtatgaattcctgaagtattacggcattcccgtcatcgtcattgcgacaaaagcggataagattccaaaaggaaaatgggacaagcacttaaaggttgtcaaacagacgcttgatatggatcctgaagatgagctgattttattttcctctgaaacgaaaaaaggcaaagatgaagcatggggagccattaaaaaaatgatcagccggtaatgaaaaacccaaaacgcagtgcgttttgggttttatcgtatagttttgttccgcttgataaacaataataaaaggctgattccgatgaaaacatacggccagtatgttttgaagtgttccgtcggaatatggacggactccagccacgccgtaatttgtttaaagaagtataaaaagagggaaaaaccaatcatggcagccgcttcgtatacatattcttttctggcagccgcaaataaggagaatccgaagacgaagagaatcatttcaaaatctcccggccaccatgagagctcaggtttggcgaaaaagtgtaaacctatgccgaaaagaagcatgccgatcaggacgtgaggcccggccgcttcctttttgccctgatacaagagcacagcccccaagagcataaggagcaccggccattccccctgattcgcaaacaggtgaacctgtccgctctgaagccatgcaaataatgaagcggcaagcagaagtcccggtaataaaattgatgtttttttcatcctgtcacctacccgcagtaaaggatttttagtatgatgattacagtgggaacgagctttttatactatagcataacatttttgaaatctgttcacattttcccgaagaaactatgttataattattataaataataaattctatgttagaatgattataaataaattgcgatgtacgggggtgcatgaaagcgatgcatattcttgttgtgggagtagattataaatccgcccctattgaaatacgcgaaaaaataagttttcagccggatgagcttgcagaagcgatgctccgcttaaaagaagaaaaaagcgttctagaaaacattatcgtgtcaacctgcaaccgcaccgaaatatatgcggtggtcgaccagcttcataccggccgttattatataaagacatttttatccgaatggttctcgctgccgaaagaagagctgtctccgtttctgaaattttatgagagcgacgcggcgatcgagcatttattccgtgtggcgtgcggtttagattccatggtcatcggagagacgcaaatactcggccaggtacgctcgagctttaaaacggcgcaggcagaaaagacgatcggcaccattttcaatgagctgtttaaacaggcggtgaccgtcggcaaacgcacgcatgccgaaaccgatatcggctccaatgccgtttccgtcagttacgccgccgttgaactcgcgaaaaaaatcttcggctcattgtcaaataagcacattttgattctcggtgcgggaaaaatgggcgagctcgccgcagaaaacctgcacggtcagggtatcggcaaagtaacggtcatcaacagaacgtttttgaaggcaaaagcgcttgctgaccgtttctccggagaagcgcgcagcttaaaccagcttgaatatgcacttgctgaagctgatattttaatcagttcgacaggcgcgagtgatttcgtcgtgtctaaagaaatgatggagagagcgggcagacagcggaaaggccgtccgttatttatggtggatatcgctgtgccgagagacctcgatccggcgcttaacgatcttgaaggtgtttttctgtacgatattgatgaccttgaaggaatcgttgaagccaacttacaagaacgccgcgaaaccgctgaaaaagtcgagctgtttattgaagcggcaattgttgagtttaagcagtggcttaatacgctcggcgtcgtgccggtcatttcggcgctgcgtgaaaaggcgctgtccatccagtccgatacgatgcagagcattgagcgcaagctgcctcatctgacggtgagagagaaaaaacttctcagcaaacatacgaaaagcatcattaaccaaatgctgcgcgacccgattctgaaagcgaaagagcttgcggctgaagcggattcagatgaaaagctgaagctgtttatgcagattttcgatattgaggaagaggccggccgccagctggacaaaagcctggataaccgccagacggttcattcgtttcaaaaggcagaagcaaaaacgggcttacgtccgcttgtaagtgagtgagggctgtatgattgatacagcaatggcaagacttaatgaagcgacaattgttatttatgcagtaagcgtccttttttactttatagattttcttcaacacaaccggaaggctggaaaaatagccttctggttgctttctattgtctggactctgcaaactgtctatctttcttatttcatgtggcagacgggcagatttccggtcttgaatattacagaggccctttacttttatgcgtgggtgcttgtcacgctttcacttgtggtcacgcagattctgcgggttgattttatcgtgtttttcacgaatgtcatcggtttctcgatgattgcgatccatacgttttcaccgacggatcagcattcggccgccttttccggccagctggtctcagagcttttggtcattcatattacaatggcgattctgtcttacggcgctttttccctttcttttgtcttttcgcttctttatcagtttcaatattctttattaaagaagaaaaaatggggaaaatggctgttgagaattgaagatttgtcaaaacttgattatatggcttacgttttaaatgtcatcggggttccgatgctgctgttgagcctgatattaggcgtgatctgggcgtatgtgtcgctggaaacgctgtactggtttgactcaaaagtgctcggctcgtttattgtgctgcttttatacagctactatttatatatcagaatgattaaggaactgcaggggaaagtggcggcgttatggaattcagcatgttttctcgtgctgatgattaattacttcctgctcggaagcctgtcacaattccattggttcagttaacgcacgcgcccaaacagattcgggaggaaagaaaatgagaacgattaaggtaggttccagacggagcaaactggctatgacccagacaaaatgggtgattaacaaactgaaggaattgaatccttcctatgactttgaaatccgggagattgtcacaaaaggcgaccgcatcctcgatgttacactgtcaaaagtgggcggcaaaggtttgtttgtcaaagagattgaacaggcgctgctgcatcaggagattgatatggcggttcacagcatgaaagacatgcccgccgttttgcctgagggtcttgtcataggctgcataccgaaacgtgaggatccgcgtgatgcgctcatttcaaaagggcatcaaaagctggacggcataaaagaagggggcatcatcggcaccagcagtttaagaagaagcgcccagattcttgctgaacgccctgaccttacaattaagtggatcagaggcaatatcgatacgagacttcaaaagcttgaaacggaagattacgatgctattattttagcggctgcggggctttcgagaatgggctggaaagatgatgtcgtatcggaattcctcgaaccggaccgctgtctgcctgcggtcggccaaggcgctcttgccattgaatgcagagagtcggatgaagagcttttgaagctgtttgcgcaatttaccgatgagtatacgcagcgcacggtggcagccgaacgggctttcttacacgcgatggaaggcggctgccaagtgccgatagccgggtatgcgtccgtcaatgaccgggatgaggttgaattggtcggtcttgtcgcgtctccggacggaaagacgatttataaagaaacagcggcgggacatgatccggaagaaatcgggaaacgctgtgcggcgatgatgtctgaaaaaggagccaaagcactaatcgacagcgtgaaacaggagctcgaacaggatggcaaatgaccttcctttacaaggaaagaccgtgctcgtcacccggaacaaaagacaggcagcaccgtttcgaaaaaaagtggaggcgctcggcggaacggctgtttccgcctctctgatcgcttttcaggaagcgctcccggatgaatgtgcggacagtctgcgggaagacctttctgaaccgggctggcttgtgtttacaagcgtaaacggtgtccggttctttttttcctaccttgatcagcatggccttgcgcttccggaacggaaaaaaatcgcagccgtcggtgaaaagacagcgcgcgccctgaaagagcggggagcccggacggatgcgatgcctgacgagtatgtggcggaatgtctggctgatactttaaaacggcacgcatcagctgccgaacccgtttcattgataaagggcaatttatcacgcgatgtcataaaagcggagcttgagccgcttggctatcaaataagggaatgggtgttatacaataccattcaggatgaaaaaggcatggacgagctgagacgggctgcatcccgctctcattttgattttattacgtttaccagttcatcggcggtgcatacgtttatgcacgcggtcggagacggagaaaaagcgtgggaaaacagcggtgcgagctatatcagcatcggccctttgacagagaaagcgctcttggaatacgggatctcatcccatgtgcctgacacctatacgattgaaggcatgctggacgtcatgtgcagcatgtcgggaaaggatagataatgatgaatcaaacatttaacagacaccgccgtttgcgcgcgaacgctgcgatgagagatctagtaaaagaaacacgtcttcacccttcagattttatttacccgttatttgtcgttgaaggactcgaaggaaaaaaagaagttccttccatgccgggggtttatcatgtatcactcgatttgttaaaggatgaaatggctgagctgatatcgctcggcattaagtcggtcatcgttttcggtgtgccggaagaaaaagacgcctgcggaacccaggcttttcacgatcatggcattgtgcagaaagggattgctgaaattaaaaagcattatcctgaaatgatcgtcatcgctgatacatgtctctgtgaatacacggatcacggccattgcggggtcgtgaaagacggagtaatcctcaatgacgagtcgcttgagctgctggcgcagacagccgtcagccaggctaaagccggcgctgacatcatcgctccttcaaatatgatggacggttttgtcacagtgatcagggaagcgctcgacaaagaaggattcacgaatattccgatcatgtcttatgccgtgaaatattcaagtgaattctacggcccgttccgcgacgcggctgacagcacgccgcagttcggtgaccgaaaaacataccagatggatccggccaaccgcctggaagcgctacgtgaggctgaatcagacgcggcagaaggcgctgactttttaatcgtcaaaccgtctatgtcatacttagatattatgcgtgatgtgaaaaaccgccatcacctgccgctggtcgcatataatgtgagcggggagtattccatggtgaaagcggcagcccaaaacggctggattaaagaaaaagaaatggtgctggaaattttaacgggcatgaaacgtgcaggagccgatctgattatgacgtatcatgcaaaagacgcagcgaaatggcttgctgagtaacgatttcatttgacgggagctgaggcagatgagaagctatgaaaaatcaaaagccgcttttaaagaagcgcagaaactgatgccgggcggagtgaacagcccggtgcgcgcgtttaaatcagttgatatggacccgatctttatgcagcgcggcaaaggatcgaaaatttttgatattgacggcaatgaatatatcgactatgtgctgagctgggggccgctcattttgggccacacgaacgacagggtcgttgaaagcctgaaaaaagtagccgagaacgggacaagtttcggggcatctactgaagtggaaaacgaactggccaaattggtcattgaccgtgtaccgtctgttgaaatcgtgcggatggtcagctccggcacagaggcgacaatgagcgccctgcgtctggcaagaggatacaccggccgcaacaaaattttgaaatttgaaggctgttaccacggccatggtgattcgctgctgatcaaagcgggatccggagtggcgacactcggcctgccggacagcccgggcgtgccggaaggaatagcaatgaatacgattaccgttccatacaacgacttggaaagcgttgcactcgcattccgggagtacggtgaagatattgccggggtcattgttgaaccggtagcaggcaatatgggcgttgttccgccgcaggaaggctttttacaaggacttcgcgacattacggaacagtatggcgcgctgctcatttttgatgaggtcatgaccggttttcgcgtggattataactgcgcgcaagggtatttcggcgtgacgcctgacttaacgtgtctcggcaaagtcatcggcggcggtcttcctgtcggtgcgtatggcggaaaagctgacattatggaacgaatcgcgccgagcggtccgatctaccaggcgggaacattgtctggaaatccgcttgccatgacagcgggacttgagacgttacagcagctcacacctgaatcttaccaagaatttgtgaaaaaaggcgatatgcttgaagaaggcatttcaaaagcagctgcagcacacggcattccgcacacgtttaaccgggcggggtcaatgatcggcttctttttcaccaatgagcctgtcattaactatgaagcagccaaatcttctgatttaaagctgttcgccaagtattataaagggatggccgacgcaggcgtatttctgccgccgtctcaatttgaaggattgtttctctccactgcgcatacaatggaggatattgaaaataccattcaagccgctgagaaagtgttccaggcgatcagccgctgataccgaaaagccgatgcaagcaagacttgtatcggcttttttcaatgcctccattatcatattttcccggattgcggcatacacctttagtgacatctaattgtatggattagatgaaaggaggatatgaacttgccgcataatcaccgattgcaattttctgttgaagaatcaatctgtttccaaaaaggacaggaagtttctgaattactttcgatttcattagaccctgacatcagggtgcaggaagtaaatgattatgtctcaattaaaggatcattagaacttactggcgagtacaacatagatcacagcagtcattttgaagagcttgatagggagctgaggcatgtagaggaagtgagggcgagggaggatggcacggccgagctcattcattgtttcccggtggacatcacgattccgaaaaataaagtgagccacctcaatgatgttttcgtatttattgatgcctttgattatcagctgacggattcaaggatcttaaccattcaagctgatttggcaattgaagggctgcttgaggaatccgagccgaaagagccggagatccctttgtacgtggcgcctgaattttccagagaagaaatgatcaatcttgccggacatcattctgaggacgaaaatgaaccagaattaatgatacgccatgagcctgaaatacctttgactgtatcagaagaagcagcacaagaaacagagaagaacgaggaagaaatcccgcctttactcaggcaggaggaagaagagcaggaaacagccccgattctgagggagcgggaagaagaaaagcaggaaacagccccgattctgagggagcaggaagaagagcaggaaacagccccgattctgagagagcaggaagaagagcaggaagcagccccgcttctgagggagcaggaagaagagcaggaagcagccccgcttctgagagagcaggaagaagagcaggaagcagctccgattctgagggagcgggaagaagaagagcaggaagcaggcccgattctgagggagcgggaagaagaaaagcaggaaacagccccgattctgagggagcaggaagaagcgcaggaagcagctccgattttgagggagcgggaagaagaagagcaggaagcagccccggttttgagggagcaagaagaagaagagcaggaagcagccccgattctgagggagcaagaagaggtgcctaaacctgtttcctttactgagcctcctcctcccgtttccttccagcacgaagaagagccggaagaagctgaggagcctgcaatcatgtcagctgtgaggaatgaacccgtatttgaggatgattcagcagaagtgcaggaagagccgaaagatgatatcgaaccggttttccctgctttcactctgactccgcatgcagaaaaaccaaaaattgcggaacagcccttccttcaaaaagaagagcagccagaggccgagccgcttctccgtcagagcgatcataaggcggcagaagacgaagatgagcctgcggtttttcaagaggagcaggcgcccgtttatcgcgagttcgttccggaacggcaggaagaggagttttacagcgctcctaagctgcttgaagaagaggctcatggtgaagaagggtttgaaattgaggtaaggaagatggcgccgccggaggaggaaaccgggaagcctctcgatttgtcttttcagttttccaaactgccgcctgaggagccggcgcaagctgaacagcctgagccgcttaagcctgaaagaaagaatgaagaagcggcaccgggaaccgagcagaaggaaaatgacaactctcattacttgacaaaattatttacaagggaagaagaaaagttttcaagaatgaaaatttgtatcgtgcagcagcaagatacaatcgaccgggtgtgtgaacgatatgacattacatcccagcagctcatccgaacgaatgctttatcgtttgatgacgagcttgaggaaggtcagcttctgtatatacctgaatataataacagccatgtgtaagcacaaagaggccgtaaaaatgtggtgaatggaatggaagcagtccaatcagtgcttcaggaatacgggctggcggctgagtatattgagcctgtcagcccgcatgtttggaaggtctactcaaactacggcatttttgctttgaaacagctcaagccggcccgcagcagtgaatttacggatcttatgattgagattgaggagaaaggctaccgatcatttgtgccgatctgccgcacgtatgccggcgatttttttgcggggagacagacggagaattcttattatttaatgccttggcttcagtacgatcaggaggaagaacgggatcaaaaacatgtttacctttttaaagaggtcgcgaagctccattctgcgactgtgcgggacatccaaatccggactgaagatatcagcggcttttatgaagcaacgaaaagagattgggaaaatgataagcttgtctatgaacaattcgccgaccgggcggaaaaagagtggtacctttcaccttttgaactgcaggccgttacgtatcttacagaaacggtttccgccgtcaattttgctctggaacgtctggaagaatggtttgacgcggcaaaggatcatgacaagacgagagcggtgatcaaccacggcagtttatcgagccgccactttctgtataatgatgcgggatcgggctttttcacgaatttcgagaaagctgcgctgggccctccgcaaaatgacctgctcggcttttactccagaatgttcagaagctatccgaaagcatgtccggaatgtctggactggttttatacgtatcacaaatcattcccgctccgtgaagcggaaatcagtctgtttctcagctatatggcttatccgtccgccatgtacaaagtgctgaaacggtatcagaccggccaaaggggctctgaaaaagaagagtgcacgcaattattaagagcgttttggcagatgaaaaatgttgagccttttctcatgaaggttcatcagattgagcgggagaaaaaaataaaagcggaaaacgagtcctcttcataacaggactcgtttttttatatccattccaaatgcagggcgcacgctaaaaacagcaggatggcaagcagcaggacatcaaaagtcgtcggaaagaaaatcgtcctgatcccctgaaagatcgtaatcggaataatgacttgcacggatacaaggcggacctgtctggcccactgggggagcgaataagaattgaatttttttctcacgggcaattcctcctcacattcgcctttctatgtatcgtatgtaaggggaagagcggggtgcatgcccatttatgtatgacggcagcggtttttggaaaagatgattgacgaatcaaaaacacttttactataataaagaacataataaataagatcatgagctgatataaatacacctgctttgaacgggaagagtacaagaaagacgcatgaagagagagaagctactgtgctgaaaggcttcttatgccgtctcattggaaggtcgcccgggagcataatttcttgaacatacagtagagaaattcgggccgcacccgttatccgtttaagtgcatgaacaaatctgttcatgaaaaaaggtggtaccgcgaaagagcttttcgtcctttatcaggatgaaggctcttttttagttgctcagccatttctaaacatgctggagggttatcatggatacaaacgaacaaacaatgccgacaaaatatgatccgtctgcgattgaaaaaggccgctatgatttttggctgaaaggaaaatattttgaagcgggcggcgatcaaacgaaacagccgtattctgtcgtcattccgccgccgaacgtgacgggcaggctgcacctcggacatgcgtgggatacgacgctgcaagatatcgttacgcgtatgaaacgcatgcagggctatgacgtgctctggcttccgggcatggaccacgccggcatcgccactcaggcaaaagtcgaagcgaaactccgcgaacagggcacaagccgttatgacctcggccgtgaaaagtttttagaagaaacgtggaagtggaaagaagagtatgctgatttcatccgcagccaatgggccaagatgggactcggactcgattattcacgtgaacgtttcactcttgatgaagggctgaacaaagccgtgcgtgaagtattcgtcaagttgtacgagaaaggcttgatttacagaggcgaatatatcatcaactgggaccctgccacaaaaacggctttatccgatattgaagtgatttacaaagacgtacagggcgcgttttatcatttgcgctacccgttagcagacggttcaggctcaattgaaatcgcgaccacccgtccggaaacgatgcttggcgacacggctgtcgcggttcatcctgaagatgagcgctacaagcacttaatcggcaaaacggtgattctgccgattacaaaccgtgaaattccgattgtcggcgatgattatgttgatatggaattcggatcaggcgccgttaaaatcacgcctgcccatgacccgaatgactttgaactcggaaaccgccacaatttagagcggattctcgtcatgaatgaagacggaacaatgaatgaaaaagcgctgcaatataacggcatggaccggtttgaatgccgtaaaaaactcgtcaaagatcttcaggaatccggcgttctctttaaaatcgaagaccatatgcattctgtcggccacagtgagagaagcggcgccgttgttgagccgtacctgtccacacaatggtttgtcaaaatgcagccgctggccgatgctgcggttgaccttcaggcaaaagaagagaaggttcacttcgttcctgaccgtttcgagaaaacgtacctgcactggatggaaaacatccgtgattggtgtatttcccgtcagctgtggtggggccaccgcatcccggcttggtatcataaagaaacaaaagaagtgtacgtcggccttgaggcgcctgaggacagcgaaaattgggagcaggattcagacgtgcttgatacatggttcagctccgcgctttggccgttttctacaatgggctggcctgatgaaaacgctgaagactttaagcggtattactcaaccgatgtacttgtaacgggatatgacatcattttcttctgggtatcccggatgattttccaaggtcttgagtttaccggcgagcgtccgttcaaagacgtgctgattcacggcttaatccgtgacgagcagggcagaaaaatgagtaaatcccttgggaacggcgtggacccgatggatgtcatcgacaagtacggagcggattccctgcgctacttcctggcaaccggaagttcaccgggacaggatctccgtttcagctatgaaaaagtggaatccacatggaacttcgcaaataaaatttggaacgcctcccgttttgcattaatgaacatggacggcatgacgtatgacgagcttgatctgtccggtgaaaaatcagttgctgataagtggatcctcacaagactgaatgaaacgatagaagacgtgacacagcttgcggatcgttatgaattcggtgaagtcggacgccacctgtacaactttatctgggacgatgtgtgcgactggtatatcgaaatggcgaagcttccgctgtacggggaagatgaagcggcgaagaaaacaacccggtctgttctggcatacgtgcttgaccagacgatgcgtcttcttcacccgtttatgccattcttaacggaagaaatctggcagcaccttcctcatgaaggcgagtcaatcacgatcagctcttggccggttccggtgccggaacatacggataaagaggcagcggcggatatgaaactgctcgttgaattaatccgttctgtccgcaatatccggagcgaagtcaacacgccgatgagcaagcaggttgaactttacattaaaacatctaccgaagacattgccggccgccttgagaagaaccgttcttacgttgaacgctttacgaatccgagcacgctgaaaatcgggacggatatcgctgcggcagacaaagcgatgacagctgtcgtcaccggagcggaagtcattctgccgcttgaagggctgattaacattgatgaggagatcgcccgtctgcaaaaagaattcgacaagctgacaaaagaagtcgaacgcgttcagaaaaaactcggcaacgaaggattcattaaaaaagctcctgagcatgtcattgaagaagaacgcggaaaagagaaagactacacggcaaaacgcgaagctgtccggcagcggattgcagagctgaaaggctgataaaacagcggggcggtttcctaagaaaccgccttgtcgtataaaagaggggatttcattgtttaatacgtacaaagaagcgatcagctggattcacggcagactcaagttcggcgttaagccgggccttctccgtatggaaaagctgatggaaaaactggaacacccggaaaagaacattcgcgccattcatgtggcgggcacaaacggcaaaggatcaaccgtttcttttatccgttccgtccttcaagaagccggttatacggtcggcacgttcacatcgccttacatgattacgtttaatgagcgaatcagcgtcaacggcacgccgattaccgatgaggaatggagaacgctcgttaatgacataaaaccgatagtcgatgagcttgataagaccgatgccggaacggtgacggaatttgaaatcattacagcgtgtgcatttttatattttgcgaagcgggctgatatcgattttgtcatttttgaagcggggctcggcggcacatttgattcaaccaatattgtgaaaccgcttctgtcggtcattacaagtatcggacatgaccatatggccattttaggcaataccatcgaggagatcgccgggcagaaagccggtattattaaaaattccattccggtcattacgggcgtcaatcagccggaagcactcggcgttattgaagcggaagccgaaaaaaagcaggctccgtatcagtcactatataaaacgtgcagactgtttaatgaagcggcgcttccgtccggcgaaagcttttcgctggaaacagaaacgaaatgctatgaaaacattcaaacgtcgctgatcggcattcaccaaaggcagaatgcggcattggcgatattggccgctgaatggctgaatcgcctggaggccgcagtcatttcagaagaagcgatgcgaaacggactgggaaaatcttcctggccgggccggtttgaacgtcttcaaagccgccctttagtgtttgcggacggcgcccataacgaagagggtgttgaaacgctgacagaaacgatccggcagcgctttgccggtaaaaacgtccatgtcgtattcagcgcattaaaagacaaaccgtatcaggaaatgattaaaaagcttgaaaccgaagcggattccattcactttgtatcatttgactttccgcgtgcttcaagcgccgaagccctttacaatgcaagcagtcttgcatctaagagcttcgatgagaacccggacagtgtgaaagaatggatagaacaaaaagacggggcggatgatgtcatcatcattaccggctccttatattttatttcagagatgagaaagcggcttatctgacagcctctcggatgcccggcagaccattttccggttttgccgggtgtttttatgctgaaaatatattttcagccatttcagtcatggtgtttttctttgctataatctgagccagattgatagtaaaggtgtggtctgagtgcttttaattctgttttttctcggcttgattttcggttcttttttttatacagcagcgtgccgtatcccgctgcgaatctcggttatttcgccgcgttcatcctgttcgttttgccgcttgccgctctcctggggggagcttgtgcccgtcgtctcctatattctgcaaagaggcagatgcagaaactgccgtgcgaagctgtcggttatgtatccggcggcggaatgctggacggcgtgtttattcacggctgcaggcattcatttcggtttctcaaaagaactgttagtcgcgctgttatttctgtctctcctcatgattgttactatgacggatctgcaatatatgctgattcctgacaaagttctgctgttttttcttccgcttttcatcgccggccgaatgttttctccgctggattcatggtatgcagggtttgccggagccgtttgcggattttttctgcttgtttttatcatgtttgtcagtaaaggaggcatcggcgcaggtgatgtgaaactgtttggggtgatcggcctgacgctcggcgtgaagctcgtgctcattgcattctttctttccgttatgatcggagcggtatacggtatgtgcgctgcagcccggggcagtcttggtaaaaagcagccatttccgtttgcgccggccatctcagccgggagcgctttgagttatttatacggtgatgagctgttttcgttttacatcaagctcgcttcaggcggggcttgaaaaatttggcgaacgttttttggacaagacgacaaaagtcttgttcttttttttttcgcctatgctaaagtgtgaaccatgatcagttcaaggtacggccaagacgaatgcaagggggaagagacgttgaaaaaaaggaagagcaaaaagcacagcaaagctaaaaacaatgcccttaaagtaaccattaacggacaagaagaaacgatgtatggacaagaagatgtgaatgaaggcggggagaagaccgtcacattttccaattgggaagaaacaaaaaaggcggaacaggagaccgccgcttcccatgaagatccgaaagaagaagatttcaattgggatcatgagaagaattctgaggtatttgaagatgacccgaaagtcgttccgccataccagaagaaaaaaacaggccctcattttccgaaaaaaaagcagccgtcttctccagttaaaaaagcggtcacgacaattgccgttgcggctgttttaggcaccgggctcggccttgtcgccttaaatatgtcgggaagtaaagaagcctccgctccggcatcagctgacaaaggttcacaagggcagacggtgaaagcgggagatgtttctaacgacaaatctgaaacagccggcacaggagatgcggaatcttcagcgggaaactataaaacatatgcggtgcaggccggaaaattttcatcagaaaaaggagcgcaaacgcttgttgaccagctgactgaaaaaggatactcggccgtctctctggcaaaagaagacggatacacatacgtgatcgccgggcttgcagcggaaaaaagcttatcacagcaattgggtcagacactgatagaccatgattttgaggcttggggcggaaaagagctcagctttgcggtcgattcagggctggaagactcttttaaacaggcatctgagctctccgccaaagcgattaccggcaaaaatctttcaaaaacggaagtggctgaagcggcaaaagcggcagacggcgcagacgccgctgacaaaaagcagaaagaggccgtgcttcaagcgctgaaagaactggaaacgtcgggttcggaatccggctggaaagcccaaaaagagctattaagtgttgtaaaatagtatctcatttcccgtcatccggcgggattttttattttgtcatcaaaaagttatttttctgaaattgtggttgcccgtttgatttggtaggatagacaagtatctttttttcttaagcaaaccctgaaaggatgacaaccatgacaaaacgcttaatactcgcatcacaatctccgcgaagaaaagaactccttaatcttcttcagattccttacagcattattgcgagccgcacagaagaaaaattaaatcgaaacctttcgccggaagaaaacgtccaatgtttggccgagcaaaaagctagtgctgtattggccgaaaatcccgatgcagtcgttatcggggctgacacgatggtgtgcatagacggcgagtgcctcggcaaaccgcgtgacagggaagaagcggcacagatgctgcggaggctttccggccgaagccatcaagtcattacggcggtcagcattcagacgcgtgaccggaaagaaacattctgtgacacaacggaagtgacgttttggccgctcagtgaagacgacatacagctctacattgaaacaaaagaaccgatggataaagcaggtgcatacggcatccaaggaaaaggcgcgcttttagtgaaaaaaatagacggtgatttttattctgtcgtcgggcttcctgtcgctaaaacaatgagagccttgaaagaatttaatataaaagcttgatgttcaaaccgggaaggggaacaaggaggggttgatcatccgtgatctgccgttaaaattaagagatttccccgaaaaagaaaaaccgagagagcggcttctgcacttcggagccgaacatctctctaacaatgaattgctcgccatcctgctgcggacgggaacgaaacatgagtccgtcatgaacctcgctcaccggctgctgcggacgtttgacgggctgcgcctgttaaaaggcgcctctgcccaggagctttccagcattccgggaatcggaacggtgaaggccgttcagattcttgccgcaattgagctggggagccgcattcataagacatccgccggggagcattgcgtcatccgctctccggaagacggggcgaagtatgtgatggaggatatgcgctttttaacccaggagcattttgtctgtttatatttaaataccaaaaatcaagtcattcataaacgcaccgtttttatcggaagtctgaattcatctattgtccacccgcgggaggtgtttaaagaagctttcaaacgatccgccgcgtccttcatttgcgttcataatcatccttcaggagatcctacaccgagcagggaagatatagaggtaaccaggcggctttttgagtgcggaaatttaatcggcatcgagctgctggatcatttggtcattggtgataaaaaatttgtgagtttaaaggaaaaaggatatttgtaacactttttttttcgttgatttaagatataatagattttatgagtttttccctttagggtatttttgctttaagaaaggaagatacatacatatgttcggaattggtacaagagaccttggtatagatttgggaaccgcgaatacgcttgtgtttgttaaaggtaaaggaatcgtagtgagagagccgtctgtcgttgctctgcaaacggatacgaagtcaatcgttgcggtcggtaacgatgcgaaaaacatgatcggaagaactccgggcaacgtggttgcgctccgtccgatgaaagacggcgttatcgctgactatgaaacaactgcgacaatgatgaaatactacattaatcaggctgtgaaaaataaaggattgtttgcgagaaagccgtacgttatggtgtgtgtgccgtcaggtattacggccgttgaagaacgggcggtcatcgacgcgacaagacaagcgggcgcacgtgacgcttatccgattgaagaaccgtttgcggcagcaatcggtgcgaatcttccggtatgggagccgacgggcagcatggtcgttgatatcggcggcggaacaactgaagtggcgatcatttctttaggcggcattgtcacgtctcagtcaatccgcgtagccggtgacgaaatggacgactcaatcatcagctatatcagaaaaacatataatctgatgatcggtgaccgtacggcggaagccattaaaatggaaatcggttcagcagaaaccggtgaagaaaatgcgtcaatggaaatccgaggccgcgatcttctgacaggtctgccgaaaacgatcgaaatcacgggaacggaaattgcaaatgcactgcgtgatacagttctctcaatcgttgatgcggtgaagagcacgcttgaaaaaacaccgcctgagctggccgctgacattatggacagaggtattgtattaacagggggaggcgccctgctccgcaatctcgacaaagtcatcagcgacgaaacgaaaatgcctgttcttatcgctgaagatccgctggattgtgttgcgatcggcactggaaaagcactggagcacatccatcttttcaaaggaaaaacaagataatcaggagttaaatagaagaggtgtatcacgatgccgaacaaacggttaatgctattacttctgtgtattatcatattggtggctatgattggattctcgctgaagaacggccgtaataccacctggcctgaaaagctgatcggtgatacgacgggagtatttcaaaacatttttcacacgcctgccgaatattttgcagggttcttcggggacataaaagacctgaaaaacacgtacaaagaaaacgaacgcttaagacaaaagctggacggacagacacaatatgaagcgaagctccaagaactcaaagatgaaaacaagaagctgcgtgatgaactcgggcatgtcaaatcaatttccgactatgatccgattttagcgaccgttatcgccagaaaccctgatcaatggtacaagcagatcatgatcaataagggaacgaagcacaaagtggccaaagacatggctgtcacgaacgaaaagggtgcgctggtcgggaagatcaaaagcagcggactcaacagtttcacatccgccgttcagctgctgagcgatgttgaccgcaataacagagtggccaccaaaatctccggcaaaaagggaagcaaaggctacggtttaattgaagggtatgataaaaagaaacagaccctgaaaatgaccatccttgaaccggatgaaaaacgtgaagtgaaaaaaggcgacctcgtggagacctccggaacgggcggcgtatttcctcaagggctgacggtcggcgaagtgaccgatgtagaatcagatgcttacggcctgacgaaaatcgcttatgtgaaaccggctgccgacttgtacgatcttgaccatgtcatcgtcgtgaaccgaagcgtagcaacaggggaggaaggatcgtgaaacgtttccttctccctttgattatgattttggtcttttgtgcggaaagcatctataccgatctggtgcgttttcctttcgtttccgtcgagcagcaggtcgttccgcattttcttttgcttgcgctgatttttatgtcggcttatatcaaccaaaagcatgcggtgatctacggtttcattttcggatttctttatgacatcaattatacgggtgttttaggcgtttatatgtttggttttgccggattatgctatctggcggccaaagcgtttaaagtgctgcagacaaacgccctgatggtcattctggtcgcggtgctgagcgtatgtgtgcttgaattttacgtctacggcattcagacgttaatccgcagcggcactatgacgtttaacgattttgtcattcagcgattcttgccgaccgctttgctgaatatcgcgggagccgttatattagtcctgcccttcaggctgttttatataagtctgaagaaagaattaagagatgagtaaaaaggattttatctttttttgacgaaaagagtatgttgttgaggtgaacattgatgaagaccaaaaagcagcaatatgtaacaataaaaggaacaaaaaacggcttaacattgcatctggatgatgcgtgttcttttgatgagctcctcgatggtcttcaaaacatgctgtcgattgaacaatatactgatggcaaaggccaaaaaatcagtgttcatattaaactcgggcatcggtatctgtatcaggaacaggcagagcagctgactgatctgatcgcgtcaaagaaagatttagtcgtgcattcaattgacagtgaagtcatcgccaaagaagaagcgcagcggatgaaagaggagcaggaaattgtttcggtttccaaaatcgtccgttcgggccaggtgcttcacgtgacgggagatttgcttttaatcggagatgtgaatcccggcggtacgatcagagccggaggaaatatatttgttctcggttcattaaaagggattgcccacgcgggttataacggaaataaccgggctgtgatcgccgcatccgaaatgatgccgacacaattgaggatcaatcacgtgttaaatcgctccccagaccacattcaaaaagggaacgacatggaatgtgcttatttagatactgacggaaatatggtcattgaacgccttcagcaattggctcatttaagacctgatctaacaaggcttgagggaggaatgtgaaattgggtgaggctatcgtaataacttcgggaaaaggcggagtaggtaaaacaacaacatctgcaaacctcggtaccgccttagccattttagggaagcgcgtctgtttggtagacacagatatcggactgcgcaaccttgatgtcgtaatgggtcttgaaaacagaattatttacgacttagtagatgtaattgaaggccgatgcaagacgcatcaggcgcttgtcaaagacaaacgttttgatgatctgcttcatttaatgccggctgcccagacaagcgacaagacggctgttgtccctgagcagatcaaatcgcttgtgcaggagcttaagcaggaatttgattatgtcattattgattgtccggcgggaattgaacaaggctataaaaatgccgtctccggagctgataaggcgattgttgtgacgacgccggaaatatcagcggtgcgggacgctgaccgcattatcggacttttggagcaggaagatatcgaaccgccgcgccttatcgtgaaccgtatcagaaatcacctggtgaaaaacggtgacacgatggatgtggatgaggttgttcatcatctgtctattgatctcctcggaatcgttgctgacgatgatgaagtgatcagggcttcaaatatcggcgaaccgattgccatgaattccaaaaaccgcgccagcattgcgtaccgcaatatcgcccggcgcattttaggagaatccgttcctttgcaggtgcttgaagagcagcaaaaagggatgatggcgaaaatcaagtcatttttcggcgtgcgttcataatatataccagaatacaaagatctgatgaagcccagcttatcaggtcttttttgttttttaagagcgcatatttgcaatggacaagacataggatgtacaaacccaacgattgcaaaggatgatggcgatgagtcacagagctgatgaaattagaaaaagactggccaaaagaagaaaacagcggcctgaatcaaaacggactttcgttcaaaacgctcaaacgcagaattttcccgcgtggcagacggtcaaggagcaggaaaagcacaagcttcttccggactacgaatatcaaacggaacacccgcccgaatttaacgggcggcatccattgatcagcgctcattctattattttaaaatgcctgctggccgcctgtctcgtactgatctccgctattgcctataaaactgacaaacagccgctgagtcagatcaaaccggcaatcgcacaaacctttcaaaaagaatttcagtttgctgccgtaagcaattggttcgtatcttccttcggaaacccgctcgcttttcttacgccgggaacgaaaaagaaggacggtcaggtggcggtcagtcaggatatggccgttcctgccgcggggaaaatccagcaggactttcaaaataacggagagggcgtcgtcgtcgaaaccgccagtgaagccattgacagcgtaaaagaaggctacattatggaagtgagcaaagataaaaaaacagggctgacggtgaaggtgcagcacgccgacaatacaagcagcatttacggccggctgaaagatgttaacgtttcattgtacgattttgtcgataaagggaaaaagatcggttcgatcaagctcaacgataaaagtaaaggccagtactatttcgcgatccaggatggcgataaattcatagatccgatccaggtgatcacatttgatgaataaatggctcatcctcctttttaaaattcatgtccatccttttctttggattatcatggggctcggtcttatgacggggcacatcaaagcgctgctgtgtcttttgctggtcgtatccgttcatgagctggggcatgctgctctggctgtgtttttttcgtggcgcattaaacgcatctttctgctccctttcggcgggacggttgaggtggaggagcacggaaaccggccgcttaaagaggaattcgcggtcattttggcgggcccgcttcagcatgtgtggcttcaggcggcagcctggctctttttcacgtcaggttttgcaagtgagcagacatttgagatgtttaccttttataacctctccattcttttcatcaatcttttgccgatctggccgcttgacggcggcaagttcgtgtttttatacttctctaaacaaatggcttttcaaaaagcgcatctcctcagcctgcagacatcggccgtttccgcgcttttgctctgctgctggattgtgctggccgtcccccttcaggtcagcgcatgggtgctgttcgtctttctcgccgcttctttatgggatgaataccggaagcggcattatattcagctgaggtttcttttggagagatactacggcaaaaaccgcgatgtcgccatgctgcatcctttgacggtcgcggccgatgccaaagtaaagcatgtcatggctgaattcaaacggggatgcaagcaccccattatcattgaaaaagccggcgaaaagctcagccagctcgatgaaaatgaagtgcttcatgcgtattttgccgataaacggacagattcctctatggaagacctgctgctgccttactagaaatagattgacatatccttttggttctgatatattttttaatgttatggatgtagcaccaatgctacaaccgctcgggacaggtgataagagctttaaagccccctgttgctggcgagtcttagtctaataggaggtgcagagaatgtacgcaatcattaaaacaggcggaaaacaaatcaaagttgaagaaggtcaaactgtttacatcgaaaaacttgctgctgaagcaggtgaaacagtgacgtttgaagacgtattgtttgttggcggagacagcgtgaaagtcggcaacccaacagttgcaggcgcgacagttacagctaaagttgaaaaacaaggccgtgcgaaaaaaatcactgttttccgttacaagccaaagaaaaatgttcataaaaaacaaggtcatcgtcagccttatactaaattgacaatcgaaaaaatcaacgcgtaagcatgattgaggcaacaattcgaagatcccggaatgacgggggcattttgtcctttgaaatgacgggacatgccgattttgctgaacatggacgagatctcgtttgcgccggggtcacggctgtcgttttcggagcggtcaatgcggttatcgcgctggctcctctcgaaccgattcttgatataggcgaggacgggggttatttctattttgaattccctgaagccgctgatcaggaagctttgcaaaaagcgcagctgctgattgaaggcatgattgtttctcttgaaacgatcgagcgggattacagtgaacacttacggttgactgcaaaccaaatataggaggtgagttacatgcttagattagatcttcagtttttcgcttctaaaaaaggtgtaggttctacaaagaacggacgtgactctgaatctaaacgtttaggcgctaaacgtgcagacggtcaattcgtaacaggcggatctatcctttaccgtcaacgcggaacgaaaatctacccaggtgaaaacgtgggccgcggaggagatgacactctttttgctaaaatcgacggaactgttaaattcgaacgtttcggccgtgaccgcaaaaaagtgagcgtatatcctgtagctcaataatgacacaaaaaactccggtcgttgactggagttttttttgcagtaagcggagtaacatcaagaatgaaaagcagaggatgcgtgagtgaaccccgccttgaatgaggacatcagcttctcatacccactggatatgttccccaagcagtgataccaaaaatgtttctgcctggcatccgcattgtatgcgatccgaaaaaggaacatgatgaaccaggaaaaacaagtgtttttttaacaaagccttctctgttataattcatagtacacacttatcaagactcctaaaaagaaattaaacgattgggagtgcgaaaatgaaggatgtatcgaagaaacaagaagaacctgtaagcgatgcggctctgatcaatgaactgatccaattaatgggccatttccgtcatgattggatgaataagctgcagctgataaaaggaaacttaagtttgcagaagtatgacagggtcgttgaaataatcgacgaaatggtcatagatgcaaagcacgagtcaaagctctcaaacctgaaaaccccgcacttggcgtttgactttctgacatttaattggaagtcccgttatatgaggctcgaatacgaagtgctcggagaaattaaagatttatcggcatatgatcaaaagctgtcgaacctgatgagaaaactgtttcatctgttcggtctggcggtaagcaatgaaagtgaaaatcatctgaccgtatcgctgcagacggatcaccctgacagacagcttattgtatatctcgattttcatggaacgattgcaaatgcagatgtgtttgatgaatttcgcaaatcccggtatgaggactttgatgtcatgcaatttgagctgaccggccatgaatgtgtggccgaaattggaatgaactagcggttttttacggtttagaacggaggatattatgtttgtagatcaggtgaaagtatatgtaaaaggcggcgacggcggtaacggaatggttgcgttccgccgtgaaaaatatgtgccgaaaggcgggcctgccggcggtgacggaggtaatggaggcgacgtcgtttttgaggttgatgaaggactgcgcacgctcatggacttccggtaccagcgccatttcaaagcgatacgcggcgagcacggcatgtctaaaaaccagcacggcagaaatgcggacgatatggttgttaaagttccgcccggcacagtcgtaacggatgacgatacaaaacaggtcattgccgatctgacagagcacgggcagcgcgccgtcatcgcaaaaggcggacgcggcggacgcggaaatacccgctttgcgaccccggccaacccggcgccgcagctgtcagaacacggagagcccggaaaagagcgctatatcgtgcttgaactgaaagtgcttgcagacgtaggtctcgtcggcttcccgagcgtcggaaaatctacgcttctgtctgtcgtttcatcagcaaagccgaaaatcgccgattatcattttacgacgcttgttccgaatctgggcatggtggaaacggatgacggaagaagcttcgtcatggcggatctgcccggtttgattgaaggagcgcacgaaggagtcggcttaggccaccaatttctccgccatatcgaacggacgcgcgtcatcgttcacgtcattgacatgtcagcgatggaaggccgtgatccgtatgaggattatgtgaccattaatcaggagctcagtgaatataatctgcggctgacggagcgtccgcaaattatcgttgcgaataaaatggacatgcccgaagcggctgaaaatctaaaagcgtttaaagaaaagcttcaggatgaccatcctgtcttcccgatcagcgcggtgacgagagaaggactccgcgatcttctgtttgaagtcgccaaccagctggaaacaacgcctgaattcccgctgtatgatgaagaagaactggcggaaaaccgtgtaatgtacacgatggaagatgaagaaattccatttgacattacccgtgatccggacggcgcgtttgtgctttcaggtgacagtctggaacgtctctttaaaatgactgacttctcccgtgacgaatccgtcaagcgttttgcaagacagatgcgcggtatgggcgttgatgaagcgctcagagaacgcggtgctaaagacggcgatatcatccggctgctggaatttgaatttgaatttattgattaaaaagacggagagcttgcaatgcaggctctctgatgtaaaagggaggggtgcaggtgaaagaagagacattttatttagtgcgtgaagacgttctgcctgatgcgatgcggaaaacccttgaagtcaaaaagctgctcgacagaaaaaaggctgaatcggttgcagatgccgtgcagaaagttgatttaagcagaagcgctttttacaaataccgagatgcggttttccctttttacacgatggttaaagaacaaataatcacacttttctttcatttggaggatcggtcaggcgcgttatcccagcttttgcaggcggtggctgactcaggaagcaacgtgctttccattcaccagacgattccgcttcagggcagggcgaatgtcacgctctcaatcagtacgtccgcaatggaagaaaacattcatacgttaatgaataaactgagaaaatttgattttatagaaaaagttgagatcttagggtcaggcgcgtaaggagagaagagacatgaaagtcggttatttagggccagaagccacatttacacatctagcagtcagttcctgctttcaaaacagcgtgacacaagcaccttatcaaacaataccggcatgcatggatgcggcggttgcgggagaagttgatcttgcatttgttcctttggaaaacgcgctggagggctcggttaacttaacgattgactacttgattcatgagcagcctcttgcgatcgtgggggaaatgacgctgccgattcaccagcatctgctcgttcacccttcgagagaaaatgagtggaaaaagcttgagaaaatttattctcattcccatgcgattgcgcaatgtcacaaatttcttcaccggcatttttcgtccgttccttatgagtatgcgaagtcaacaggtgcggctgccaagtatgtcagtgagcattcggaccttccgatcggcgtgattgcaaatgaaatggcggccgctacatacggattgagcatcgtgaagcgggatattcaggattatcaggacaaccacacgagatttgtcattctttcgcctgaaaaagacgtctcattcgaagtgaatgcgaaactgtcttcacggccgaaaacgacgatgatggtaacgcttccccaagatgaccaatcaggcgcgctgcacagggtgctgtccgctttttcatggagaaacctgaatttatcaaagatcgaatcgcgcccgaccaaaacgggtctcggcaactatttctttattattgatattgaacaggcgatggatcaggttctcattcccggtgccgttcaagagatggaagccctcggctgccgggtcaagcttctgggaacatatcaatcctattcgatataaaaaaagctccccttcagggggctttttttttaatcttttattaaaatacccgcgtcgtccagcgcttgacaggcttggtcaatccgctcttttgtcggggcgcttaacgtatggagatgcacgcctccggtcagctgtgaaaggtaagcggcatttgtcgagttaatgtgatccatgaattgtttgacttctttccgtgtgctgactcttatggcggcggttaaatcgccgtatacggggtgttcaataatgacgtcctttatggtgacgccttcatcgacaatgagttcaagctcttcttccgtccgctccgggccgtgcagacaggcgacaatccgttcggcgtttttttcgccgccggcattcatgctgatgtataaatagccttggctcgtcgcgataatcggttcgctttttgctttcaagagcgatatgtcctgcacgatcacctgtcttgaaacatttgcttttttggccaattcgcctcctgttaatggcgagccggcttctttcagccaatgaagcagcatgtcgcgtcttttcgccccagtaagcttcgttccttctgtcaaattgctgattctcctttcttttgctcccatagcgccgtaaatgtatgtatcagcatatcgagctgttcacatgttgtttcgtttccgaatgagatccggaaaaactgccgcgcttcccgttcggtttttctcagcgccttcatagctgaagaagggccgtggctgccggcggaacatgcgctcccggttgagatgcaaatatcgttacgattacattctaacataatatattgtccttcaaaggagtgaaaaaaacacccgacaatgtggggcaggcattcaccgccggtttcttcctctgaaaatgaaatggggaggccttgacgcctaatttggtcatacaaataattcctcagcctgtcagcatgctcacggtgttcctccatatgtttcactgcatactccgcagcagcggtaaaagcgccgatggccggcacattcaccgtaccgggcctgaacccgttttcatgcacggtatgcggataaaccggattccagctgacacccggccgaatgtaaacagccccggtgcctttcgggccgtatactttatgaccggagacggaaagggcgtcgattcccgcctgatccgcatcaatcggcagtttgccgaaactttgaacacaatcgcaatgcagtaaaatgtttctctggtgaagaaaagcggccagacgattcacaggctggatgaggccggtttctgaattggcgtgctgtatggaaacgagccccgtgtcaggacggatatgagccgccagtatgtcctcggttataaggccgttttcgtcgggatatatgatggtgacatcaattccccggtcagctaaaaacgccgcggcattatggatcgagtggtgttccattgcggtcgtaataaaatgttttttatgatcgggcagaccgtacagcaatgattggacggccaagatgttcgcttccgttccgccgcttgtaaagtgaatgccgtctgccgctccgccgatcaattttcctgcagaatgtctgcaatattccagcacgtccgccgctcttcctccggcgtcatgaaggctgctagcattgccgtatacctctgtgctgagatgctgaaagactttcgcggcttctttgcttaaaggcgttcccgccgcgtaatcaagataaatcatacagcccgtctcctatccgtttatgttaaaaaaagcttgagtttattttatcgttgtgtaaatataggtgtcaagacaggtgtaaatataatgggagggtgatgtatgtctgaaaaaacaattatcgtcattggtacggggacggcggcccttgcctgtgcttcctcatttcctccgtcataccaagtaaccgtcatcacaaagagaaacgtaacgaacagcaattcgtattatgctcaaggcgggattgctgtttcatacgcaaaagatgactcgatagaatcccatgtgaacgatacactgtatgcgggatgcggacacaatgacgtgacagccgtgcggcatttgctgcaaagcggacagagcatgataaacaggctgatagaaggccttttcccttttgatacgaagtcggacggaacgttttgtctcggcagggaaggcgctcattccaaaaggaggattctgcacgccgggggagatgcgaccggacggatgctggttgagtttctggttcggcagctgagggacggcattcggatcattgaacacgagacggttgttgatctgctgattgaacacgggcgatgcgcaggcgttgccgtaaaggatgcttcaggtgccgtttcttacagaagagcggattgtgtagtgcttgcttcaggcggctgcggcagtctgtaccaatatcacacaaatgattccgccataacgggagacggcatcgctcttgccttccgcgcgggagctgagatcacggatatggagttcacccagttccacccgaccctccttgtgaaaaacgggactgtttacggtctgatttctgaagcagtgagaggagaaggcggatatttagcagatcgcttcgggcgcaggatcatggctggcagacacgcgcttgaggatttggcgccccgggatgtggtttcacgggcgatttatgaagaaatgatgaaagaaaatcctgtttttataaattgcagccgaatagccgattttaacaaacgttttccgaccataacagaaatttgtcaaacagccggcgttgatcttgaaagcgggatccccatagcacccggaatgcattttttaatgggcggagtaaaagccgatacatgggggaaaacgtccgtgcctgatttgtacgccataggcgagaccgcctgcacaggcttgcacggggcgaaccgccttgcgagcaactcactgctggaagcgctggcaagcgggcaacgatgtgctgaacatatcattcaaacaccgttaaacggaagatataaaaaaaccccgaagaaaactgatgtcatcttacaagtgccggacacaacgattcatgtgcttcaagccaaaatgacaaccggagcgggtatcgtcagggaaaaagaaaacctgcaggcgctgacatcctggcttaacaacgtatctgtgcatcatataaatgtgaaggatatcacaatggaacaagcagagctatcctgcctatggaagactgcgcaacttgttgtcacctcagcccttattcgggaagaaagcagaggcgctcattttcgtactgattttcccgggacggagaaagattggcacggaaaacaaatcattcattcaacatctggaacggttatcagaaaaaacgaaaggattggggaactatggacattctgcagctgaaacaaatgctgactcatttttttcaggaagatatcggaacgggtgatgcgacgtcacaagcgattttttctgatcagcaatgtaaagcgcggatcatcgcaaaaacagacggcgtgtttgccggagaagacgttatccgtgaaggatggaagcttttacacgatgatatccgcatccgccctctgaaaaaagacggagaacggatgaaaaaaggagatgtgctcgctgaaatggaaggccgggcggcagctcttcttactggggagcgggtcattctgaatctcatacaaagaatgtcaggcattgcgacaatgacggacgaggctaaaaggcgtcttgatgatccgtccattaagctttgtgatacgagaaaaacgacaccggggctcagaatgctggaaaaatacgccgttcgggtcggaggcggctttaatcatcgcttcggcttatatgacggcatcatgattaaagataatcatattgccgcctgcggatcgataaaggcggccgtggagcgggcaagagaaacggcagggcagatgcttgcggtggaagtcgagatcgaatccgaacagcagctgctcgaggcaatagaagcgggcgcagacattattatgtttgacaactgtccgcctgagtccgtccggcgttttgcaggcatgacaccgggccatatcaaaacggaagcatccggaggcataacgctcgacacattgcccgcttataaagggacgggcgtccaatatatttcactcggatttctgactcattcagtaaaaagcgccgacatcagcatggatgttgaggctgcggaacagggggatttttaagatgtctatttttgacgtgttaactgcatcagccgaaatgatgccgagccattataaagacatgagcaccggagaaatggaaaagcgtgtcgccgccattaaacgggatttcggaaagcgcctgttcattccggggcatcactatcaaaaagacgaagtgatacaattcgccgatacggcaggtgactccctgcagcttgctcaagtggcagaaaaaaataaagaggcggaatatattgtgttttgcggcgtgcattttatggcggaaaccgctgatatgctgactgatgataaccaaaccgtcatattgcccgacatgcgcgccggatgctcgatggctgatatggcagatattcagcagacggacaaagcatggcaagagcttcaagaactgtacggtaacaccatcattccgttaacatatgttaactcgacggcggaaattaaagcattcgtcggtcggcacggtggagcgaccgtcacctcttcgaatgcccggagtgtgctgaaatgggcttttaaacaaaaagaaagaattttatttttgccggatcagcatttaggcagaaatacagcctatgacctcggcattccgctgacagaaatggctgtatgggacccggggcagaaccgattgcttactgaccatccggaaaacattaaagtcatcctttggaaaggacattgctccgtacacgaaaagtttacagcggaaaatatttttcagctgcggcagcgggattccggcatccgcattatcgttcatccggaatgttcgcgggaagtggtctcgctcagtgacgacagcgggtctaccaaatatattattgatacgattgaacaggcagaaccgggaagcaagtgggcgatcggcacggaaatgaatcttgttcagcgcctcattcactcgcacccggataaacagattgaatcattgaatcccgatatgtgtccgtgtctgacaatgaacagaatcgacctgccgcatttattgtggtcgcttgagcagcttgaaaaaggcgagccgaagggtgtcattaaagttccggaagcggttcggacagaagcgcttcgtgctttgaacagaatgctgagtcatacgtaatcataaaaatttcccctccttcccaaattttttatcatcatgcccagtccaccggcatatagtgtgaagaaacgtattgtaatgacaaatgtaccgttcacgttttgtgcataggaggggaaaacgttgaaaattcatatcgttcaaaaaggcgattcgctctggaaaatagctgaaaaatacggagttgatcttgaagagttaaaaaaactgaatcatcagcttagcaatccagacttaattatgcctggaatgaagataaaggtgccttcagaagccgttccggtcagaaaagaacccaaggccggcttcggaacgtctgcgcataagcatgagcatccatatgccaaagaaaaaccgaaatcagttgtggacattgaagacaccataccggaagaaccgaagccgtcaattccgtatgtgccgccaatccctgaaaagcatgaaaatgtgctgccggaagctgatatgaaccaatattatccgtccaatcagctgtttcagccgtggtcgcctcctaagccggaggaaccggtgacacattttgtcgagccgaaagaaaaagagcatgacaataacattccacaacaggaggaaatgatcaacatggaaaacgcgaattacccgaatatgccgaaggcgcctgaagccggaaagatggaagaagaaaacgccgcttatcatctgccgaacatgccaaacattccgaatgtcccgtttccgaatatgccggccgttgaaccgccttttatgcattacccgatgccgtgcatgccttgtccttgtccggttccggtgacaccgatgctgccgggttcgggactatgccatccgtgcttcccggtaggcggaggtttcggcggttttggaggaggttatggaggctttccggtaatgccgatgccgttaccgtacggattccatcatcacggattccatcatccgggatttgggccgcaagcgggttacggtgaatatgaaaaccaggcccatgaaaatgcagagcattatgatggttctgcatccggtttcggcggtgctccgtacggtcaaatgccgtattacggcggatattcgtctcattacgcaaacgcgcctcatcatgatgggaaatttaaggatgatgattgcggctgccatgattcacatcaccaccaccatcatcaccacggttcacatcaccatcacgcaaatatgcctgtgcagccgtatccgaatgtgggtgcaaacgccggatattttatgccttacggcggagcaaatcctaatgccgcaccgaatcagccgagtccaaatcaagtattcggacggccggaggaagaagaagattaatgtttcgggacgatgtatgtcgttcctttttttatgtccaactgaggaatggacataactgacaagcttaaacccgccgtcggccgcacatcctaaacatgagcggaaaacgctcaaacagcgatgaatccacggggggtttttccattgggtaaaaaactgatgacgatcgcaggcgttttagccgtgacggcaagcttaacggcatgcggagcaaataatgccatgaatgacggacgctacaatcagtcaacacgtccggtcggatattattcgaatgataatgataacggcagacgccagtacggaatggaccatcaaggacccgtttctgaaatgatggaaaaccgaaacggccgtcataatacgacaaacgtgtctgaccagtatgcgcctaatgacggggttccgttaacgacggacggcacatataacggccgaaatgtcaatacgccgccggcagctatgtcttataatgggtatgacaacgccgaaaacatcaggctggcggcaaaagttgcaaaccgcgtgaaaaaagtaaaaggcgtacaggatagtcaggtcatcgtgactgacacgagagtcgtcattgctgtcagaacaaatcatccttttacgaaaaatgatgataaacatgtcaaacatgcggccaaaagatttgcggacggccgtacaattcaagtgtttaccgacaacgctacttttacaaagctgcaagacatgaacagaaacagccgttaaacgggactgccggatgatttcatccggcagtatttttatggataaagcttcatcatttctttacatattcttaaaacgctctttatgttgcggtgttaacataaaagtaataaaacgtaacggaggggccggaatgaaaaaaacggagcatgacaaaagccgcggagaaaaaactgtgtatctgaccgtaaggggataccggctcaaactgacgtccggacaaatgaaactgatttcagccggccgggcataatcatcggggcagccttcataatagaggctgcttttattcggctgaaacagacaaatgaaagaaaacggttaagcaccggcatctttggtcaaactagcatcaagagtttgattgaataaagaggtgttattggtgaaacgaatttgcggtgctcgtctattgtttatgcttatcttatcggctgcagtcctgatttgcggaggaaaaggcgcatacggggcggaggttgagcattacgggccgcttcgggtgcacgtccagctggaaaaggtctatctggacggtgatgtcggcatcgaacatacggatgaaaccgttttggcgatggaggatttttgggccgcatatgcgggctggacgctcgttgagcagaaaaaaggcttcgttcttttccgtaagcatgttgatgacatttctccgctcagtaaggttaacggttatatcggcgtcacggacggaggcgtcatctccacttttcacggccgtcccggatcgctggccgagccgatccaatctttcttccagattgatatagaaaggctggaaagccgattgcaaaagcacttggaacacggcataccgtacaggacaaaagcggagtttgagagcgtgatcgatcatattaagacttacagcggatgactttgacgcaagacatgtgacacatgtcttttttttctgaatggaagatgtcaaagcgaacatacgttaacttttctataagactttggctgtttttgtgttacaatgataagcagtcaaagaggtgaataggtgtgattgaattcgtgaaggggacgattgattatgtatctccccaatacatcgtgattgaaaacggcggaatcggctatcaggtcttcactccgaacccgtttatttataaggtaagcaatcaagagaccatttttacgtatcatcatataaaagaagacgccttttctttgtacggtttttcaacccgggaagaaaaagcgcttttcacaaagctgctgaacgtcaccggcatcgggccgaaaggggcgctcgccatcctcggttccggtgaccccggagccgtcatcgaagcgatcgaacaggaagatgaagcctttttggtgaaatttccgggtgtgggcaaaaaaacggcgcggcagattattcttgatttgaaaggcaaactggccgacgtcgtgcctgaaatgattgacaacctgttcaatcatgaagcgcgcattgaaaaacaagaggctgaaacggcgcttgacgaggcgcttgaagcgcttagggttctcggctacgccgaaaaagaaattaaaaaagtgcttcctcacttaaaagaggaaacggcgctttcaacagatcaatatgtgaaaaaagcattgcaaaaattattaaagtaaggtgatgttcatggatgaacggctcgtttcaagtgaagcagacagccatgaatcaataatcgagcaaagcctcaggccgcagaatctcgcccagtatatcggccaaaagaaggtgaaagaaaatctgcgcgtgtttatcgatgcggcgaaaatgaggcaggaaacgctggaccacgttcttttatacgggcctccgggtctcgggaaaacaacgcttgcgtctatcgtggccaatgagatgggggtggagatgcggacgacgtcaggtcccgccatcgaaagaccgggagatttggcagccatcttgacggcgctcgaaccaggggatgtgctgtttatagacgaaattcacaggctgaaccgctcgattgaggaagtgctgtacccggcgatggaggatttctgccttgatatcgtcattggaaaaggcccgtccgcccgctccgtccgtctcgaccttcccccttttacgcttgtaggagcgacgacaagggtcggattattgaccgcaccgctcagagaccggttcggggtgctgtcgcgtcttgaatactatacgcaggaagagctgacagatatcgtgtcaagaacggctgacgtttttgaagtggatatcgaagaagctccggctctggagatcgccagacggtcaaggggaacgccgcgggttgcaaaccggcttctcagaagggtgagagattttgcccaggtgctcggcgacagccgcatcacggaagaaatcgctcacgacgcgctcgaacgtcttcaagtcgatgcgctcggccttgaccatatcgaccataagctgctgatgggcatgatcgaaaaattcagcggaggtcccgtcggccttgatacgatttccgcgacaatcggcgaagaaccgcatacaatagaggatgtgtacgaaccgtatctgctgcagatcggatttctccagaggacgccgaggggacgggtcgtgactccggctgtgtatgaacattttcgattggaggcgcccgcccgtgactgactttccgaaggttctcatggttctcggtgccgttttgcttattgccggcgcagtctggcactttgtcggaaggctgcccggagatattttcgttaagaagggaaatgttacatttttctttcccgttgtcacttgtattgtgatcagtgtgatactatccattctgcttaattttttcggcagaatgaaataacaatagacagaataaaggtgaaatgatgaaagtcgatttatttgattttgaactgcctgaacgcctcattgcccaagtgccgctgaaagaacgtgacgcatcgcggctgatggtgctcgacaaacagacgggcgggctgacggacagttcatttaaagagattgtaagcttttttaatgaaggggattgtctcgtcttgaacaatacccgtgtgctgcctgcaagattattcggcacaaaagaagatacgggagcgaaagtggagcttctgttattaaaacaggaagaaaatgatacatgggaaacgctcgtaaagccggcgaaacgcgtaaaaaaaggaacggtcctgacatttggcgacggccggctgacagcggtctgcacggaggagcttgatcacggaggcagaaaaatagaattccggtatgacgggattttttacgaagtgcttgaatcactcggtgaaatgccgctgcctccttatattaaagagcagcttgatgataaagaacggtatcagaccgtcttttcaaaagaaatcggatctgccgcagctccgacggccggacttcattttacggaagagattctggacgagctgaagcaaaagggtgtgcggattgaatttatcacacttcatgtgggactcggcacattccgcccggtcagtgcggatgatgtggaagagcataacatgcacgcggaattttatgaaatgacggaagaaaccgccgcctctttaaacgaggtcagaaaggcgggagggcgcatcgtgtcggtcgggacgacatcaacgcgcaccctggaaaccattgccggcgagcatgacggcgtatttaccgcttcaagcggctggacgtccatattcatttatccgggatatgaatttatagcgattgacggcatgatcaccaattttcatctgccgaaatcttcccttatcatgctcgtttctgcgcttgccggcagagagcatgttctttccgcctaccgtcatgcggtagaagaggaataccgtttcttcagctttggcgacgccatgctgattatctaatttgaagacaggaggcctcatacaaagtggctgaacaaccgatacgttatgaatttataaaggaatgcaaacaaacgggagcgcggctgggcagagttcatacgccccacggctcctttgagacgcctgtatttatgccggtcggcacgcttgctacggtaaagacgatgtctccggatgagctgaaatctatggatgcgggcattattttaagcaatacgtaccatttatggctccgcccgggacacgacattgtaaaagaagcgggcgggcttcataagtttatgaactgggaccgcgcgattttaacagattccggcggttttcaggtcttttcattgagcaagtttcgtaatatagaagaagaaggcgttcatttccgcaatcacttaaacggagacaagctgtttttatctccggaaaaagcgatggaaattcaaaacgccctcggctctgatatcatgatggcgtttgatgagtgtccgccgtatccggcagagtatgattacatgaaacgctctgtggaacggaccagccgctgggcggaacgctgcctggaggcgcacgggcgctcagatgagcaggggctgttcggaatcgtacagggcggagaatacgaagacctgcggacacaaagtgcaaaagacttggtttcgcttgattttccggggtatgccataggcggattatctgtcggcgagccgaagcacgtcatgaaccgagtgcttgagtttacaaccccgcttttaccgaaggacaagccgagatatttaatgggtgtgggttcaccggatgccttaattgacggcgccatccgcggcgtggatatgtttgactgcgtactgccgacccggattgcccgaaacggcacggtgtttacgaatgaagggcgtctgaatatgaaaaacgccaaatatgagcgtgatttccgtccgattgacgaagagtgcagctgccatacatgccaaaattactcccgcgcttacatcagacatttgatccgctgtaatgaaacgtttggaattcgattaacaacttaccataaccttcattttctgttacacttaatggagcaggtcagacaagccatccgggaggatcgtcttggtgatttccgagaagagttctttgagcgttacggctataataagccaaatgcgaaaagcttctaaataaaaccattcatgaaaggagggaaacagatgggtactttaggcacaatcgttcctattattttaatgtttgcagtgctttatttcctgctcatccgtccgcagcaaaagcagcagaaggccgtccgccagatgcaggaagagctgaaaaaaggggattcagtggtgacaatcggaggattgcacggcactgttgattcaattgatgaaagcaaggtcgtcattaaaacaggtgataacacccgtttaacatttgaccgccgcgcaatcagagaagcttccgctgaataacagcgaagctcatacatacaaaaaaagagcggagaatccgctctttttttattacgctgatctgcttcctttcaaattcactccgaaaatgccgcccagcatactgactcccaaaaagccgagatgaaacaaaagctgaccggatgtaaacgtttttccgaaccctaaatattgaaaaagcaagatgattaatgaaaaacagacggcggttaacgctccgatcatccagcctttttccttcgctttgccgcccgatataaaacctcccgcaaataaagaaagaaaagaaagcgcggtgatcagccagctgaaagatgattcttccattgaggtgactgtcagtaaaagcgaaatcgccaaactcgtaagaagcatcaccgcaaaaatagccactaagccgtacaaaacgcctcttcccacttgtttcgtttcttccatttttatctcctctccgctctgcggcctgatatatgacaagccggagcccgtctttttctaaatgtattctctgaatgttcgaattagacgtaaatgcatgatgttcagcccgtttcttacataattcagagccgatggcaaatgctatgaccgttggaggtgcgatatggaagatattttcattattacgtttcgtacgattgtgctttattttatcattcttgtgattttcagactgatgggaaaacgggaaatcggagaactgagcattttagaccttgtcgtctccattatgattgccgagattgccgtattggcaattgaaaatgtaaaagataagcttttgcatacaattgtgccgattgtcgttttaatgattattcaagtaagccttgcttttatttcgctcaaaagccaaaaaatacggcagctgcttgacggaaaacccaccattattataaaacagggaaaaattgatgaacgggcgatgagatcgcagcgctacaattttgacgatcttcttatgcagctgagggagaataacatcgatagaatctctgacgtatcgtatgccattttggagtcttcgggcaaactgtcaatcgtcaaaaagaaaaacaataaggataagcagatggaaacatcgcttatcgttgacggggtcattcagaacgagcatctggacagaatcgggaaagataaacactggcttgaaaaaaatttagcaaaaagaggatatcgcgatctttcggttatatcattctgcacgtttacggacggcgctttttttattgatctcaaagatgaaaaaggggagccataaatcggcttcaccgcgtcacgaacttgccgatgaccggaatccggatcagctcttcccttttaatcagcctgaataacagcagcagcgcaatgtacaaaatcgcggtcattgcaatccagcctgtgagattaacagcctctgatcctgaaaaatgaacggtgtgcttgatgatgcggctgacataaccgcaaatgaatatgacggcaaaacagagcgcgtattcttttattttaatgctgatcggaagcaccttgcttacggtggccgcatgcagcagggtgacaaggaccatccccgttacaatcgcaagtgcggcgcccatgatgcctaaggaaggcctggtcgccaaaacaaaaattaggccggttttgacagcggcgccgataaaactgttcatcatggcggccccggctaaattgagagcctgcagcaccgcctgaagaggcccctgaaaatagtaaagcagaaaaaacggcgccatcactttaacaaataccgccgcattagttgatccgtacatgacggacatcagttcatcagcgaaagagaataaaataaccaccgaaatgcctccgcttaaaagacacagcctcatcgcctgttccagacggtattctacaacttgcagctttttttgctccattccttcactgatcgcaggaacaagcgccgttgacagagaataggttataaagctgggcagcgtcaaaaccgtcatggcaaatccggtcagctccccgtactggctggtggcggcagcggtggccactcctgcaatcgcaaggctctgcgcgacgacaataggttcaaaaaaccaagataaatttccgatgaagcggcttccggttgtcgggagcgacacgctcatcagctggcggaaggtttcttttccatttgcaatcgacttgaaaaattgttttctgattctgattgttttatttgctttaaaacaaatgaataaataaataagagaggcaagctccccgatgacagacgaaatcatggctcctgctgcggcatattcaatcccgtacggcagaaacaccgtcgtgcagactgcgacaagtgaaatccgcacgatctgctcaagcacttgggaaaacgccagcgggttcatattctgcctgccctgaaagtaaccgcgcagcacgctggatatcgcgataatcggcacgacgggcgtaatcgccagaagcgggaaaaccgtgcgctgatccgtcagcatcgtttctgacataatcggcgcaaagcataaaaacagcggcgtgaagatgagacttaatatcccggtgacggtaagcgccatcactaaaatgtgtttcattttctgccggtccccccgcgcgcttgcttcagcgacaagtttgctgatggcaacggggaggccgaattgagtcaaagtggtggccaagaaaaatgtcggggcagccatcatgtataaaccgaccccttcttcaccgataaaccgggcgataaccacccggttgacaaagccgagcattctcgtaatcatcccggctgcaatgagaataagagtgccccttaaaaaagtctgttttgccattttataaacccctgccttctcaaactacctggaatcatatacaataaagatatgcgccgatgtcgtccgagcatgacaagtcttcgagaaaaatggaaaaaggagcgagcgcccagtggagaaacatcccgccgaaatgtacaaagatcatttgcggcctttcttgtacagtaaacttgaagagttcaaaatccttggatacgatgatgttgagcacgagagtttatggtcatacttaatacataaaaagtggaaacagaaaaaggaattgccgctgcatgaattggccggtaatattttatcagttaaaattggcgattttatgaactatgcaaccgttgaagcttttaagtcgtctaattggctggaaagcgatgagggtcaggaagctttggatgaactgctgagataatgatttgacggcataggtttaaggaggaaatacataatgaaaaaaggacgcttgattgcgtttttcctgatcgtattattgatcggcacagggctggggtattttacaaaaccggctgccaataatattacgttaggattggatttacgcggcgggtttgaagttctgtacgatgtgcagcccgtcaaaaaaggcgataaaatcacaaaagacgtgctcgtcagcacggtgcaggcgctgaaccgccgggctaacgttctcggcgtaagcgagccgaacattcagattgaaggaaataaccgcatacgcgttcagctggcgggcgtcacgaatcagaacagggcgcgcgaaattctgtcaacggaagcgcagctctcgttcagggatacgaatgataaagagctgttaaacggctctgatctcgtggaaaacggcgcgaagcaaacctttgatccgacgacgaacgaaccgattgtcagcgttaagctgaaggatgcggataagttcggagaagtgacgaaaaaagtcaagaaaatggcccctaataatcagcttgtgatctggcttgattaccaaaagggcgattcatttaaaaaagaagtcggcaaaaaacatccgaaatatgtatccgctccgaatgtgagccaggaattaaacacgaaggatgtcacgattgaaggtcagttcaccgttcaaaaagcgaaggacttggccaatattttaaacgcgggtgcgctgcctgtgaaactgaccgaaaaatactctacttcagtaggggcgcaattcggacagcaggctttgcatgatacggtagaggccggcatcatcggtattgcaattgttttcttatttatgctgctttattacagactgcctggactcatagcggtcattacgctttctgtatacgtgtatattacgcttcaagtgtttgactggatgcaggcggtgctgacgcttccgggtattgcggcgctcattttgggtgtcgggatggcggttgacgccaacatcatcacctatgaacggataaaagaagaactgaaactcggcaaatccgtccgctcagctttccgttcagggaacagacggtcatttgcgacgatctttgatgcgaacatcacaacgatcatcgcagcggtcgtgctctttattttcgggacaagctctgtaaaagggtttgcgacgatgctgattttgtcaatactgacaagctttattacagctgtcttcctttcaagattcctgctcgcccttcttgtggaaagcagatggcttgaccggaaaaaaagctggttcggcgtcaagaaaaaacatattatggacattcaaaaaacagatgaaaatactgaaccgcatacggcattccagaaatgggatttcacgagcaaacgaaaatatttctttattttctcaagcgctgtaaccattgcgggaattatcatcttactggtctttaaactcaacctgggaatcgattttgcaagcggtgcgcggattgacgtgcagagcaatcatgcattgacggcgcagcaggttgaaaaagactttgactctctcggcatggatccggaaaacatcgtactctcgggtaaagagaaccatgttgccgcggcccggtttgtcggagagccatccaaagaaaaaatcgctgaaatcaaaacgtactttaaggacaaatacggatctgaaccgaacgtcagcacggtatcgccgacagtcggaaaagaactggcccgtaatgctttatatgccgtggcaattgcatcaatcggcatcattatttacgtgtcaatccgtttcgagtacagaatggcaatcgccgcgattgtatccctgctgtatgacgctttctttatcgtcgcgtttttcagcattacaaggctggaggttgacgtaacctttatcgccgctattctcaccataatcggttactcgataaatgatacgatcgttacatttgaccggatacgcgagcagatgaaaaaacgcaagccgaagtcatttgccgatctggaacatatcgtgaatctgagtttgcagcaaacctttacacgttcgatcaatacggtcttgaccgttgtgattgtggtcgtcgtgctgctcattttgggctcatcgtcaattacaaacttctccgtcgctttattggtcggtttattgacgggcgtttattcctctctttacatcgccgcgcagctgtggcttgtatggaaaggaaaagaatttaaagggaaaaaatcaatcgaagagtaaaaggaaacaggctgtcttccggaaggcagcctgttttttttaggccgcattgaacttaaaacctgcatttgctataatgacatacgcttacataatcaatcatcattgttaaaacatgtaggggggttcttatgaacgttcgtgagtcggagcttccgggcatcggccagaaagtagaagtcattacgaaaaatcacgataaaatcagtattattcttcatgatgacggcagaaaagagctctattacttcgatgagaatgattatgacgaatgcttggcatccgttgaatttaacgacgaagaggcgaggcagatttccgctattttaggcgggatgacgtataagccgaaagcgctggaatctgtggaagtcgcgcttgatgacctcgtcattgagtggtttaaagccgaatctcatgcaccggctgtcagccgcacaatcggagatttggagatcaagaaacattacaacgtccagattattgcgatcgtgaagaaaaaccggcaaaaacagctgagccccggcattgataccgtaattgaagaaggggacaccctcgttatatcgggagaaagaagcggactgaaaaagctggtccgcgagcaattaacggcccggatttcctgagaccggggtttactcccgggaaaatgggggaaaagataagaatcaataattgggggcagacgcatgaataaacaatggactattatattcgctttactatttactctgattgtcgccatctttgctgtcattaacgtgcgggcggttgaggttgattatctgttcggaaccgctgaatggccgctgattttagtcattttaggctctgtgttaatgggagcgctgatcgtgttttcagccggtatatttcaagtgatgaaactgaagcgcgaaattaaaatgctgcggaaagaaaacagatccgcaggtgaattgacggctgattcggacggcaaaaaaacagccgcgccgccggaagaaatgcttgaagagaaaaaaggatcagaataacatttgaaacccctcagtccgctctagtataatagggtggttgaggggtgaatttatgttagcgtcaaaaatgcgctgggaaatccagcagccggatcaggaaaaagtcaaatcactcacagaacaattggacataacacctcttgtggcatcactgcttgtaaaaagaggttttgatactgccgaaagcgcaaggctgtttttacatacaaaggatgcagacttttatgacccgtatgaattaaagggaatgcgggaagcagttgatcggataaaactggcggtttctcaaggggaaccgattatgatttacggagattacgatgcagacggcgttacaagcacgtcagtgatgctgacggcactcagacagctgtcggcggacgttgacttttatattcccgaccgttttacagaaggctacggcccgaatgaacaagctttccgttccataaaagagcggggattttcgctgatcattacagtggatacgggaatcgccgccgtccatgaagctgaagtcgcaaaagagctgggcttagacgtcattattaccgaccaccatgagccgggacccgagcttcctgacgtatttgcgatcatccacccgaagcagccgggatgcggctatccgtttaaagaattggccggcgtcggtgtggcgtttaagcttgcccacgcgcttacgggttctttgccggaagctatgctggacttggcggcaatcggtacggttgcagatctggtgcctcttcatgatgaaaacagattaattgcgtcactcggaattgaaaggcttcgtacgacaaatcggccgggcctcaaagctctgattaagctttccggcggagatatcggacaagctgatgaggaaacgatcggatttcaggtcgcaccgaggcttaatgccgtcggaagaatagaacaggccgatcccgctgtgcacctgctgatgaccgaagatcagtttgaagcggaggaactggcttcggatattgaccggctgaataaagagcggcagaaaatggtgaaaaccatgaccgaagaggctgttgaaatggtacagcagcaaggcggaaacccgtctgccattgtagtggcaaaagccggctggaatccgggtgtcgtcggtattgtcgcatcgaagctggctgaacgtttttaccggcccgctgttgtgcttgggatagatgaggagcagggaatcgccaaagggtcggcgcgaagcatcagaggcttcaacctttttacgagcctttcacagtgcagagacattcttcctcatttcggcgggcatccgatggcggccggaatgacgctgaaggctgaagatgtggcggaattaagggacaggctgaatcaaatggctgaagaaacccttacggaagaggattttattcccgttcaggaggttgatcttgtctgcggcgttgaagacataaccgttgaaagcattacagaattgaatatgctgtcgccgttcggcatgcttaaccctaaaccgcatgtgatggtgaaaaatgccgtgcttgatgatgtgcgcctgatcggagcgaataaaaaccacgtgaaaatgacggtgaaaagtgattccgccgtccttgactgcgtcggctttaacaaaggagagctggaagccggagttgttcccggatcaacgatttccattgtcggcgagatgtccattaatgaatggaacaacagaaagaagccccagctgatgattaaagatgctgcggtgccggaatggcagctttttgatattcgaggcaagcggacgtgggaagatacggtcaccgcactgccgaaggaaaaacgggtgctcatcagctttaacgaaaaaaccgctcagaagctccgtgaaaaagagctgacgggcgagcttgccgagatcacttcggaatccgaggcggaagctctccagcttgacggaaaatatgccgtttttctggatgtgccgccgtcagcggatcgcctgcagcatttgcttgacggaaagaagccggaacggatttattttgtttttatcaatcatgaagaacatttcctgtcctcatttccatcgcggaatgatttcaagtggttttacgcatttctcttgaaaaggggcgcttttgacttcggcaagcatggttcagagcttgcgagacacagaggatggtcaattgacacaatcaatttcatgacaaaggtgttttttgatctcggttttgttaaaatagaagatggtgtgctgtctgtcgtgagcggtgcgaaaaaacgcgacctggcagattcgcaaacctatcaggtaaaacagcagctgatggaattagaccagaagctcaattattccgcagcccatgagctgaaggaatggctgaataagctgatgaaccaaggttcagaggcttatgaaagtacgaggaggacatagaacagatggatcttaaaaaatacgtaacaattgtgcccgattacccgaaagaaggcgtacaatttaaagatattacgacattgatggacaaaggcgacgtataccgttacgccactgaccaaattgttgaatatgcaaaagaaaaagaaattgatttagttgtcgggcctgaagcgcgcggctttattatcggctgtccggttgcatacgcactcggagtcggctttgcgccggttcggaaagaaggaaaacttccgcgtgaggtcattaaagtcgattacggtttggagtacggaaaagacgtactgacgattcataaagatgcgatcctgccgggacagcgtgtgctgattactgatgacttgcttgcaacaggcggcacgatcgaagcaacgattaagctagtcgaagaactgggcggcgtcgtagccggtattgcgttcttaatcgagctttcttaccttgacggcagagacaagcttgacgattatgatattttaacattaatgaaatattaaccgcatatggaaaaaagcactcgtgtcagggtgcttttttcctattatttcatcatcctgacagattctttaggtgttttgaacttctgccctttacatctctcgtttttttcttgataataaactaatacagtttacatttaaaaaaggtgattccatggcgaacgaacaagtattgactgccgagcaagtaatagataaagcgcgcacttatctgccggaggagcagattgcgtttgttgagaaagcttacctgtatgcgcaaaacgcgcatcgcgaacagtaccgcaaatcaggtgagccgtacatcattcatccgattcaggtggcggggatcctcgtcgatttggaaatggacccttccacaattgcgggcggatttctgcatgatgtggtggaggacacggatgtcaccctcgacgacctgaaggaagtattttctgaagaagtggcgatgcttgtcgacggcgtgacgaagctcggtaaaattaagtataaatctcaagaggagcagcaggcggaaaaccatcgaaaaatgtttgtcgctatggctcaggatatcagagtcatattgatcaagctggcggatcgccttcacaatatgcggacgttaaagcatcttccgcaggaaaagcagcggagaatttcaaatgagacgttggagattttcgctccgctggcccatcggctcgggatttctaagatcaaatgggagctggaagacaccgctctccgttatttgaatcctcagcaatattacagaatcgtcaacctcatgaagaaaaagcgcgcggaacgcgaactttatgtcgaagaggttgtcaatgaagtgaaaaaacgcgttgaagaagtgaatattaaagcggacttttcaggacgtccgaagcacatctacagcatttaccgcaagatggcgctgcaaaataaacagttcaatgaaatatatgatctgctcgccgtccgtattcttgtcggaagcattaaagactgctacgccgtactcggcattattcatacgtgctggaagccgatgcctggcagattcaaagattatattgcgatgcctaagccgaatatgtatcagtctctgcatacgaccgtaatcgggcctaaaggcgatccgctggaagtgcagatcagaacgtttgagatgcatgagatcgctgaatacggggtggccgcacactgggcttataaagaaggcaaggctgcaaacgaagaagcgacatttgagaaaaaactgtcctggttccgtgaaattctggaattccaaaacgagtctacggatgcggaagaatttatggaatcgctgaaaatcgatctgttttctgacatggtatacgtatttacgccaaaaggcgatgtcattgaactgccgtcaggctctgtgccgattgatttttcctacaggatccactcagagatcggcaacaaaacaatcggggcgaaagtgaacggaaaaatggtgacgcttgaccataagctccggacgggcgacatcgtcgagattctgacgtccaagcattcttacggtccgagccaagactgggtcaaactggcgcagacgtcccaggcgaaacacaaaatacgccaattctttaagaaacagcgccgtgaagaaaatgtcgaaaaaggccgtgagcttgtcgagaaagaaattaaaaatcttgattttgaagtgaaagatgttttaacgctcgaaaatcttcaaaaagttgccgacaagttcaatttctcaaatgaagaggatatgtacgcggcggtcggatataacggcattaccgctcttcaggtggccaacaggctcaccgaaaaagaacggaagctgcgtgaccaggaagagcaggaaaaaatcgttcaggaagtcacttccgagccgaaacattatcctcaagggagaaaacgggaagcgggtgtgcgcgtaaaaggcattgacaaccttctcgtccgcttgtcgaaatgctgcaacccggtgccgggcgaccatatcgtcggttttattacaaaagggcgcggtgtatccgttcaccgggacgactgtccgaacgtcaaaacgaatgaagcgcaggaacgtctgattcccgttgaatgggagcatgaatcacaggttcaaagacgcaaagaatataacgttgagattgagattttggggtatgaccgtctcgggcttttaaatgaggtgctccaagccgtaaatgaaacgaaaaccaacatctcctctgtctccggcaaatccgaccgcaataaagtcgctacgattcatatggcgatttttattcaaaacattaaccatctgcacaaagtggtcgagcggattaagcagatcagagacatctattcagtccggcgggtaatgaactaaaaggagcttgctatgaaattagttgttcagcgtgtaacagaagcgagtgtgacggttgacggcgctgtcgccggccggatcggacccggtattatggcgcttgtcggcatcactcatgaagatacagaagaagatgccgcttacttggcggataaaatcgtgaatcttcggatatttgatgatgaaagcggcaagatgaatttatcgcttttggatacgggcggggagattttatccgtttcccagtttacgctttacggcgaaacaaagaaagggagacgcccgaattttatgaatgcggctaaaccggatcaggctgtgctcctttatgaaaagtggaacgaactccttcgggaaaaaggagtcaaagtggaaaccggaatattcggagccatgatggatgttcagctgacgaattccgggccgattacattgattatggattctaaacaataaaaaagctgccgttcggcagctttttttttatgattgaaaataatgttccaatccgctttcaattccgtctgtcactttttcctgataagagccgctatgtatgattgtttcttcttgcggttgactgagatagccgagctcatacagcatggcaggccgtttattttccctcaggacgtaataatcgccaaacagaacgccgcgatcaggaataggggaacgcttcactacttcagaatggacgtctgaggcaagctggcggtccttagacggactgtaataataagccgtgcttccccgcgttgacgtatcggcataactgtcatagtgaatgctgataaaggcatccgcattccggtaatgagaggttgaaaccctggcctgcaggctgataaatgtatcatcctgtctggtgatatacacgtttgcaccggccgctctcaattttccggctaacagcttagctgttttaatcgttacgtttttttcaaactttccggagtagccgatcgttccgctgtcttttcctccgtgtccgggatcaacgacgatcgttttgtttttaagtgagccgctgccgcctgacgtgttgggagaaggtgcttcgcctgtttcctcaccgctttttgacgtttgtacgacccagtctgccacatatgcggtttgtccgttttcaagccggacttcataccatttgccgcttgagccgacaatcgggtaggctgcgcctttatctgccctttttacgatagaagcggaagtcgaggccgagctccttaagttggtgccgccgtaaacaatatacgcttttttcgaggagcctgagcccgcagaaccgtctcccgagccggatgcgctgcccgatgagtcagaatcctttatgatgtagtggcttgctgcccagcctttttgcccgtttgcttcaattttcagccagccgtggtcttcacttaagatggaaacctttgttccgcgtgataatttagtcataatcgctgaatcatgtgacgctgcacttctgacattcaatgaagaaacgccgaccgtcccgctttttgacccgcttcgggccgaagttgctttcgtatccgatccgccgctgtccgcggtgacgtattcggaagaaacccacccggttgtgccttgataagaaatgttcacccatccgctgttcttgtccagcacggatgcatgcgcgccttgcggaagtttgccgatgacttcatacgatgtccccgggccttttctgatgcggaggtcaggatcggtggaagtgaccgttccgctttttgcggatgaattgtctgctcccccggctgtttttgatatcagccaggaaacgacccatccggttttaccggggctcagctgaagctgtacccagtctccctcttctttaacgatcgggtatctttcccctttttttacttcagcctttattccgtagctcaggccgggaccgcctctgacattgatcttgtctgtcgcgatgaccgcttctccctctgcggcgattgcggtgtgaaatgacggaagaagcgctgtgatgatgacgccgcataaaataagagcaagagttctcttcttcatggctgtcctcctttctgaactaactaaaatacattcttgtataatatcgtattttccttgctgaatgttaaataaaaataaaatggtttgtttatactagtcataaatacagcgaaaaggtgtgcaaatcatgaaatatcaaccaaaaatgggacgcgcgctgcacgatgcggaaggaaatctgcacttcagtgatcagagcgatagagaaaaggcgggttttcttgaagagacggcgacggagttcggtctcttatcgaaagaagcggtcgcaaggaaaaacagacggaataaaacttgacaggggagtgcaatcccattattataatagaaattgatgtacataactcatgataacgattttgaaccgataatggagaagagtaggtcagaatgcatggaaaagagaggaaccgtcccgggctgaaagcggatccgcactgcatctttctcgaaacaacactccggaggttccctgctgaacgcttttgcaagtcattaggcagcggacgtgaacctgcgttaaaggtcagagcggggatgcttcggcattccaactagggtggcaccacgggtataactctcgtccctactatacatgtatagtaggagcgggagtttttttatttgaagaaagacattaaggaggcctgtaacatggcatatcacattccaagaggcacacaggacatactgccgggtgaatcagacagatggcagttcgtcgaacaaattatgagggagacgtgccgcacttatcaatataaagaaatccgcacgccgatcttcgaacatacggaattattcgcaagaggcgtcggtgagtctacagatatcgtgcagaaagaaatgtacacgtttgaagaccgcaaagggagaagcttgacgcttcggccggaaggaacagccgccgcagtccgcgcgttcaatgaaaataaattatttgcgaacccggtgcagccgacgaagctttattatgtcggaccgatgttccgttacgaacgtccgcagacagggcgtttccgccaattttatcaattcggaattgaagcgatcggctccaaagatccggccgtggatgcagaagtcattgcgcttgcgatgagtatttaccgtaaagccggtttgaaacatgtcaagcttgtgctgaacagccttggtgaccaggagagccgcaaatcctaccgggaagcgctcgtcaaacattttgaaccgcgcatcggagaattttgctcagactgccagtcgcgtctgcacacaaacccgctcagaattcttgactgcaagaaagacagagagcatgaactgatgaaaacggctccgtccattcttgattacttaaatgaagaatcagccgcttattttgagaaagtaaaacaatacttaaacggtctcggcatcccgttcgaaatagatccgaaccttgtcagagggcttgattattataaccataccgcttttgaaattatgagcaatgccgaaggattcggagcgattacaacccttgccggcgggggccgctatgacgggcttgttgaacagatcggcggacctgaagcgccgggtatcggatttgcgatgagcatcgaacgactgctggcagccattgacgctgagaaaacagaccttcccgtcaatcaggggatcgactgctacatcgtgacgctcggagaaaaagcgaaggattattccgtttccctcgtgtacaaactgagagaagcgggcatctcaagtgaaatcgattatgaaaataaaaagatgaagggccaattcaaaacggctgaccgtctcggcgcacgttttattgcgattttaggggaagatgagcttgcccaaaataaaatcaatgtaaaagatgcggaaacaggagagcagcgtgaagtggtgttagacgagctgatacaagtgttaaaggcagatcaaaagcagtgaaggagaggaacgctatgtttggaagaacatattattgtggcgagataactgaaaaagcgattggcgaaaccgtcaaactgaaagggtgggtgcagaagcggcgcgatctcggcggcttgattttcattgatttgcgtgaccgctcgggtattgtgcaagtcgtgttcaaccctgacgtatcgaaggaagcccttgccgcagcggaagcaatcagaaacgaatatgtgcttgatatcgaaggcacggtttctgcccgtgaagaaggcacggtgaatcccaacctgaaaaccggtaaaattgaaatcaaagctgaagcggtgacggtgctcagtacggcgaaaacgcctccgtttccgatcagtgaccaggcggctgacgtttctgaagacgtccggttaaaacaccgctatttggatttgcgccgcccggcgatgtttcaaacattgcaaatgcggcatcaagtcacaaaatccatccgccatttcttggatgaaaacggatttcttgatattgaaacaccgattttaacaaaaagttctcccgaaggcgcccgtgattacttagtgccgagccgggtgcatgaaggggaattttacgcccttccgcaatcgccgcagatttttaaacagcttctgatggtgtcgggctttgaacggtattatcaagtggcccgctgcttccgcgatgaagacttgcgtgccgaccgccagccggaatttacgcagattgatattgaaatgtcctttatgagtcaagaggacatcatggctctggcggaagagatgatggcgaaagtcatgctcgaaacaaaaggcgttgaagtatcgcttccgcttccgcgaatgacatatgaagaagcgatgaacagctacggttccgacaaacccgatacccgcttcggcatgctgctgacggacgtgtcagacatagtgagagatactgaatttaaggtgttctcatcagccgtggcaaacggcggcgttgtaaaagcgatcaatgtcaaaggcgctgccggcgactattccagaaaagatatcgatgcgctcggcgtttttgccggaaattacggcgcgaaaggtctcgcttgggtgaaagtagaagctgacggcgtaaaaggcccgattgcgaaattctttgatgaagagaagcaggcaaaactggctgaagcgcttgatgcttctgaaggcgatctgctcctgttcggcgctgataagtttgaggttgtggctcaatccctcggcgcgcttcgcttaaagctcggcaaagaacgcggcctgattgacgaaagcctcttcaacttcctgtgggttgtggactggccgttattggagcatgacgaggaagaaggccgtttctatgcggctcaccatccgtttacaatgcctgtccgtgaagatcttgacctgattgaaacggcgcctgaagatatgaaagcgcaggcttacgacctcgtcttaaacggctatgaactcggcggaggctcaatccgtatttttgaaaaagacgttcaggaaaaaatgttcgggcttctcggctttacaaaagaagaagcggaggaggagttcggataccttcttgaagcctttgaatacggcgctcctccgcatggcggaatcgcgctcggcttagaccggttggttatgcttcttgcaggccgcactaacttaagagatacgatcgctttcccgaaaacggcaagcgcaagctgccttcttacggaagcgcccggcgaagtgagcgacgcccagcttgaagaacttcacctttctgtcaaaagaaaagtgaaacagtaaagatcggcagtttgtttcttgaaaatcaaaatctgctgtgatatgattttgacaagttaaataaagtcctgatgtgttagttgtacacctagttttgaccgaacatttttttgatttgggagcccgcatttttaaatggcgtacatgcctcttttcattcgctaaagaggacttacaagatttaaaaaagggcacccacctgctgagagcgggttcaaaacgaaggaaagctgcaacggcacaattgggactttattttttgtgcgctaaaaccagcggctttttgacaagccgagtttataaaaccagaatgtggagtgaggttcttgttacatcagttttccagaaatgagctagcgattggaaaagaagggctggacacgttaaaaaacagcacggtggccgttctcggcgtcggcggagtcggttcattcgcagccgaagcattggcgaggtccggagtggggcggatcgtgcttgtcgataaagatgatgttgacattacaaacgtaaaccgccagctgcatgcgctattgtcgacggtgggacagccgaaaacagaattgatgaaagagcggatcgctgatattaatccggattgtgacgtcgtcgccttaaaaatgttttatacagaagagacgtatgagcagttctttgagtatccgctcgattacgtcattgacgcgtcggatacgattcattataaaattcatctgatgaaagaatgtctgaaacggaatgttccgctgatttcaagcatgggagcagcgaataaaacagacccgacacgctttcagattgctgatatttcaaaaacccatactgatccgattgccaaagtcgtccgcacaaggcttcgtaaagagggcattaaaaaaggcgtacaggtcattttttctgatgaaagcccgatcgtcatccgtgaagacgtcagaaaagaagtcgggaatgatgaagcgaaaatccgcaaagcgcaaatgccgccgtcttccaacgcctgggttccgtcagtggccggtctgattatgggcggacatgttgtcatggagctcttaaaggacatcgacattaaacgggttaaagataagtaaaaagaaaaacagccttcttcaggaaaggctgtttttttatttgaatccgccgtttacacgaaagatcttgtccggttattttttctgcttcatcagtttttcatacacttgctttatggcggcttcaaatttccccgtttgtttcggtttatagtattgcttgttttttaacggatcgggcaaatattgctgttcgacccatccgttctcgaaatcgtggggatattgatagccgatcccgcgtccgagctcttgggcccctttatagtgggcgtcttttaaatgtttcggcacatcgccgattttacccgtcctgatgtctttgagcgcctcatcaacggctgaaatggcggagtttgatttcggtgagaggcataattcgattaccgcattggccagcggaattctcgcttccggaaagccgatccgttctgcggtctgaatcgcgctcagcacccgggggcctgcctgcgggcttgcgaggccgatatcttcataggcgatcacgagaagccttcttgatatgctttcaaggtctccggcttcgatcagacgggccagataatgaagggcggcgtttgcgtccgagccccggatcgatttttggaacgcggataagacgtcataatgcgcatcgccgtttttatcatgggtatagctttttttctgcagacattcttccgccgtttcccgtgtaatccggatcgtcccgtcgcttgattcctttgtggagagcacggcaagctccagtgcgttcaaagcggagcggacgtctcctccgcacccttgtgcgaaatgatccatcgcgtcgtcgtccaccgaaacgctgtaggaaccgagtccccggtgttcatctgtgagcgctcttttcaatgcctgcctgatcagatcgggtgttaacggttcaagctcaaatatctgggtccggcttctgatggccgggttaatggcatgataagggttggcggtcgtcgcgccgattaaaataatcatgccgttttctaaatagggcagcagaaaatcctgctttcccttatcaagtctgtgcacttcatcaaggattaaaatgacctggcctgacattttcgcttcctgtacgacaatctccatgtcttttttattatgaatgacggcattcaatttcctgaatgcgatgcttgtcgatcctgcgatcgctgtggcgatggacgtttttccgatgcccggcggtccgtacaggatcatggatgataagtgcttcgcacgcaccattctgccgatgattttatcttctttgaccaaatgttcctgaccgataatgtcttcgatattggcaggccgcatccgatacgccaatggtttcatgaacatctctccttacatatacagggtaacggaaaacggacgattagaaaagcgaattgcggcgggccccgtgtttcaatgaaaattaggataagttatgttataataacagttggtctataagatactaaacagattattcatatccatttacttgtataaattaacaattagaattgactggggtgttcatattgaaaatatcgacaaagggaagatacgggctcaccattatgattgaattggcgaaaaagcacggagacggtccgacgtcgctcaaaagcatcgcccaaacaaacagcctttctgagcattacttggaacagcttgtatcaccgctcagaaacgccggactcgtaaaaagcatcagaggcgcttacgggggttacgtgctcgggggccagcctgaagagataacggccggagatattatcagagtgctggaagggccgatcagcccggtagaagtgcttgaggatgaagagcctgccaagcgggagttatggatccgcatccgcgacgctgtaaaagacgtgctggacagcacgacgttagaagaccttgcgagctacacggacggcgagcaggaagcttatatgttctatatttaaaccagaggtgtaaagacaatggaacggatttatttagatcatgctgcgacttcccccatggatgaacgtgtgctcgaagaaatgaagccccatttcttcggcagtttcggcaacccgtcaagcattcattcattcgggagagaatcccggaaatgggtcgatgaagcgagagcggacatcgcgcgcgaaatcagtgcgaaagaacaggaaattattttcacaagcggcggtacggaggctgataatttagccattttcggaacggctgccgcccggaagaatgaaggaaagcatatcattacgaccgctgttgagcatcatgctgtattgcacgcctgcgaaaagctggaagaagacggctttgaggtgacatacctcatgcccggcccttcaggacggatcagtgcaaatcaggtgaaagaagcgctccgtgatgatacaatccttgttaccgtcatgtatggcaataacgaagtcggaaccattcagccgattgacgaaatcggagagctgttaagcgggcatcaggcctattttcacacagatgccgtccaggcattcggttatatgccgattgatgtgaaaaaaagcagaattgacatgctgtctgtttccggtcacaagcttaacgggcctaaagggacaggctttttatatgtaaatcaagaggtgaagctgtcaccgattcttcttgggggagagcaggaacgaaagcgccgcgcggggacggaaaatgtaccgggcatcgccggcttaaaagaagcggtcgtcctttcaaaccgtgagagggaagagaaaacagcgaagtataaggagtttaagaacatcatcatgagcacgctggaagaagccggcgttacagcggaggtgaacggagatgccgagaaatgcctgcctcatattttaaacctttactttcccggtgtgccggtggaagcgctgctggtcaatcttgacatggaaggcattgccgtctccagcggatctgcttgtacggcgggatccgttcttccgtcccatgtgcttacggccatgttcggaagtgagagcggcaggctgacttcgtcaatccgcctcagcttcggcctcggcaatacggcggaacaaatcgaaacagccgccgaaaagcttgccgccgtcgttaaacggcttgcttaaaacggcggacttatgtttttaatggagtgaatgcaaatggaaaaacggccggaggatacaagagtcgtagtcggcatgtccggcggcgtggactcttccgtggcggcccttctgctgaaggagcagggctacgatgtaatcggaatctttatgaaaaactgggatgatacggacgaaaacggtttttgcacggcgacggaagattatgaagacgtcatccgggtctgcaaccagatcggaattccgtattatgccgtcaattttgagaagcaatattgggaaaaggtatttcaatatttccttgatgaatataaagccggaagaacccccaatccggatgtcatgtgcaataaagaaattaagtttaaggctttcttggatcatgctctgtcactcggcgcggattatcttgcgacgggccattacgcccgcgtggacagaagcgcagatacagtgcgcatgctccgcggtctggatgaaaacaaggaccagacttattttctgaatcagctcaatcaggaacagctcagtaaagtcatgttcccgatcggtgatctgcaaaaaagccgcgtgcgggaaattgccaaagaagcagaacttgcgacagctgcgaaaaaagacagcacgggaatctgctttatcggcgaacgcaacttcaaaacgtttctcagccaatatctccccgctcagccgggcgatatgatgacaatggacggagaaataaaagggcgtcatgacggtctgatgtattatacaatcggacagcgccacggtcttggaatcggcggaagcggcgagccgtggttcgccgtcggtaaagatcttgaaaaaaacattctgtatgttgatcaaggattccataatccgcttctgtattccgataagatcacggcgacaaatgtcagctggacgcgtcccggtctgatggacggcggcgaaatgacatgcacggcgaaattccgctaccgtcaggaagatcacaaagtaacggtgaaaatgacgggtgatgatgaagcggaaatcatttttgacgggcaggtacgcgccgttacgccgggacaagccgtcgttttttatgacggagaagagtgcctcggcggcggaacgatagatgacgtttataaagacggaacaaaactgtggtacgtataacacatgtaaaaaacctcaactcgcatgttggggttttttagcgaaaggaagttaaaaatggattataataaaatcgggattgacgccatgcaggagggcgattttgaaaaagcggcagaggcttttacgaaagcgattgaggaaaacggccaagacccggtgccgtacatcaacttcgcaaatctgctttcttctgtgaacgaactcgaacgggcgcttgcattctataacagagcgcttgaattggacaattcggcggcagccgcttattacggtgcgggaaacgtatatgtgatgaaagaatcgttttccgaagcgaaggatatgtttgaaaaagcgcttcgctccggaatggaaaacggagatttgttttatatgctggggaccgttctcgttaaattagagcggccgaagcttgcactgccgtatctgcagcgtgccgttgaattaaacgaaaatgacacggaagcgcgcttccagttcggaatgtgtcttgcaaatgaagaaatgctggatgaagctcttgcgcagtttgagacggtgatcgagcaggatccaggccacgcggacgcattttataatgccggggtcgcttacgcgtacaaagaaaatcgtgaaaaggcgcttgagatgctggaaggcgcaatcggcatacagcctgatcatatgcttgcgcttcatgcgaaacagcttatcacccagtcataacaaaaggagggaaggctcgtggatcagctgaacatcgaagaacagccgtatgtaaaaggcgtcattcatacggtcatttatcataatgacaccaacctgtatacagtgctgaaagtcaaggttgcagaaacgtctgaggcgatcgaagacaaggtcgtatccgtaacgggctacttccctctgctgcaagaagatgagacctacacattttacggaaaaactgccacgcatcctaagttcggcctgcaatttcaggctgaacactttaaaaaagaaattccgaccacaaaagaaggaatcattcactatttatcaagtgatctgtttgaaggaatcggaaaaaaaacggcggaagaaatcgtcaaaaagcttggagacggcgcgctcaataaaattctggctgatgcgtcggtgctttatgatgtgccgaaaatgtcaaaaaagaaagcggacaaactggcgggagagctgcagcggcatcaggggcttgaacagattatgatctctctgaaccaatacggtttcgggccccagctatccatgaaaatatatcaggcctacgaaacggaaaccttggagaaaattcaggaaaatccttatcagcttgtaaaagacgttgaaggcatcggctttgtgaaagctgacgagctgggcggaaaaatgggtctgtcaggaaaccacccggagcggatcaaagcggcaatcttatatacgattgaatcgacctgtctttcagagggccatacgtacatagagacaaagcagctgattatcaatacgcaaacgctcctgaatcagtcagctgaaggcggccgcgtcacggaaatggatgcggctgacggcatcatcgccctcggggagagtaaggatatcgtcatcgaaggagagcgctgctattttccctccttgttttacgcggaacaaaacgtcgcaaaacgcgtgctcgacattgcggctcagacggagtatgccgatcaatttcctgaatcggaatttctgcttgcactcggtgaactggaagaacggatgaatgttcaatacgcaccaagccaaaaggatgccattcaaaaagcgctgtcttcaccgatgcttttactgaccgggggacctggaacggggaaaacgaccgttattaaaggaatcgtggaattatacagtgaactgcacggcgtatcccttgaccccggtgattataaaaaagacgaggcgtttccggtgctgcttgccgcgccgaccggaagagccgcaaaacggatgagcgaatctacgggtctgccggctgttacgattcacaggctgctcggctggaatggcgctgaaggctttacctacaacgaagatcagccgattgaagggaaactgatcattatagacgaagcgagtatgcttgatatctggctcgccagccatttgtttaaggcgcttcctaagcacattcagctcattgttgtcggtgatgaagaccagcttccttcagtaggaccggggcaggtgctcagagatcttttggcttctgaagtgctgccgaccgtgcgcctgacagatatttaccgtcaggctgaaggatcatccattgtggaacttgcccatgatatgaaaaaaggactgcttccaaaggggctgaccgcgccgacaaaggaccgctcatttatccgctgtaattcttcacagattaaagaagtcgtggatcaggtcgtctcgaatgcgttaaaaaaggggtatacctccagagatattcaagtgcttgccccgatgtacaggggaaaagcgggaattaacgagctgaatatgcttcttcaggacatcatgaatccgcctaaagaaaaaaggcgggagctgaaattcggagatgtcgtctacaggacgggcgataaaatattgcagcttgtcaaccagccggaaaacaatgtgtttaacggcgatatcggcgaaatcgtgtccattttttatgccaaagaaaatacggaaaaagaagacatggtcgtcgtctcgtttgacggcaacgaaatcacctttacgaaaaaggatttcagccagtttacccacgcttactgctgttccattcataagtcgcaggggagcgaattcccgattgtcgtcctgcctgtcgtcaaaggctactatcgaatgctcaggagaaatctgctttataccgccattacaagagcgaaaaaatttctgattctttgcggagaagaagaagcgcttgaatggggcgtcaaaaacaatgatgccaccgtcagacagacgtcgcttaaaaacaggctcacagagcagactgaagagatggatgcagaactggccgccctgcaaaaagagctgccgttcagtgtatatgatgcgaacatcggaatggaaggcatcacgccttttgactttatggaagaaaaagcgtaaataaaacccggcacatgttcatgcgccgggttttcgcctgtggaagtcatttcaaagtatgctgcctggcttcttggcaaaacctatacgtgttcaacaaaaggtggttgatcacactttgagaacatgccatgcagctgaaggacgaacagtatatgacgaaaacaccgggcgcagtctcgggatgatatcggatgtatgtttctctctggacggccggtttctcggtttcgtgctggagcagaaacgcctgtttcacaaccgtcatctttttttaggggcaagtgatataaaagagatggatcaagaagccgtagctgccggtcatgctcatttgcagcctttgccgaagagctgtttcacctttgaacagattaaaatgcagccggtgaaatcgcctgatggtgaaatgttcggtttgctggaagatgtatacttttgtttggacaggggcataatcgtagcatatgaactctcggacggcttcttttcagatctggctggcagacgccaagtgcgccgcgccgccgatatgcttattgaagcggggaaagaaggcatcgtcctgaacggataagaggtgtagtctgtgcttgtatgtccgaactgcaaaagtaaagatatcggcaaaatcggcgtaaaccaatactattgctggggctgcttcattgagctgacggtggccaaaggcaaaattgcgacacatcaagtagaggaagacggcacgttaagcagtcttgatgatttgttttctgaagacgaacgcagtatcaatttttaaagttgaaaggagatacgcgcgatgggcagaacaatgacctctctgttggctttaggggctggagccgttatgtatcgtatggcttctcagtccgatatgctgaataaaaaaggtatgaaacggatgagaagacgagtcatgaaaatgttttaagcggaaaaaaggatacttctccggaagtatcctttttacgtttgtctcgcttccagccgtctggcagcgagagacaggctgtaattgaccgcgaaatacatcagggccgccagcagaaagatcgggaaaaaataccccccgtcagcgctttgtccgtttaaaatctgcgcgttatgaatcagttcgggcagagcgatgacgaccgcaagtgacgtatcctttaataaggagataaactggctcacaatcggaggaaccatacgcctgagcgcctgcggcatgacgacgagaaaaagagtctgcgtgtacgtcagtcctgaagaacgcgccgcttcaatctgtcctttgtcaacggattgcaaaccgcttctgatgatttctgacagcatggccgattcaaaaatcgtcagcgccgtgatggcggccgcggtaatttccagtttgatcccgatttccggaagggcaaaaaacgtaaagaaaatgattaataacagcggcaggttgcggatggtttccacaatggccgctataatgcccgagacgataggaatgttcgcatagcgcaaagtgccggcggcaagcccgaacataaaactcaggacaatggagatcagcgcaacataaagtgtgaccaaaaagccgtcccataaaaacagcagatggtcaggtgtataggcgccgctaaaatccatgttattcactctccttctctaataactttttccgagacgtctttccaaatagtgaaccccgatgctgagcgggatcgttaatatcaaataaaaaagcgcgacgaaaatatagacatcaaacacgacaagagtgctcgaggacacgagatccgcctgatacatcaaatcgagtcccgccaccactccgagtattgatgagtttttgacaaggttgagaaattggtttccgagcgggggaatgacgatttttacggcctgaggaagaatgatatatctcatcgcctgactgtaggtgaagcctgacgatctggccgcttccatctgccctttggggacagtctgaattccggctctgatggcttctgcgataaaggcggacgtgtaaatcgtaagcgcaatcgttcccgcctgaaagccgtccagtctcagcccggcgttcggaagtccgaaataaaaaacgaatgtgatgaggagaagcgggatgttacggataaattccacatacgcagtgccgatccattgaaggggtttgaaagccgtgattctcatgactgcgatcagaacgcccagcgcaaagctgcctgccagcgcgatgaagctcgcaagcaatgtgtgcaggaaaccgtccatatacatatcgaagttttccgttaaaattgaaaagttcatctatgtcactccttataaaacggggatgagcatgcatgctcatcccgcggtccgtcctattttgccggttcttcttttatccattttttatagattttttcgtacctgccgtcggctttcatttttttcaaagaggcgttgatttctttgacaaggccggattggccttttttgacggcgattccgtaaggttcatcggtaaaggtttcgcccgtcagctgatattgtttattttcatcggccatgccgtataaaatcgcattatcggttgtgagcgcatctccctgtcccgctttaagcgcagtgaacgcttcggcgtaattttcaaattccagcactgaggcgtcaggcgctttttctctgatgttctgtgaggaagtggagccttttaccgccaatacttttgagccttttcccaggtcttcggtgcttttgatgctgcttccttttttgacgagcagggattgcccggcttcaaaataaacatctgagaaatcaacttcttttttccgctcatccgttatcgtcatcgtggcggtgatggcgtcgatatcgccgttttgcagcatcggaatcctcgtttttgacgtcacttctttaaattccgctttcttctcatcccccagaatatcttttgcgagctgttttgagatatcaatatcgaagccttcaatatcaccggagcttgggtttttcagcccgaataacctcgtatcggttttgacgccgaagatgattttgtctctgtctttaatagaggctaacgtgtcttttcccgttccttttgaatccccggacgtttctttccctccgcaggctgccagcataaagacggccagcagtgatatcaatccgaatgacaaccattttgttgcgcgtgacataagcgctcctccgtttcttttcagtgatttaaaatacggcttaagaataaacgcgccctctcttcacgggggctttcgtaaaattcagccggtgcagcttcttctaagatggatccgccgtcgataaacacgatgcggtccgccacttcttttgcgaatcccatttcatgtgtgacgactgccatggtcatgccttcctttgcgagtgttttcatgacatccagcacttccccgatcatttccggatcaagcgcggatgtgggttcatcaaacagcataatttcgggcttcatcgcaagccccctggcgatggcgacacgctgctgctggccgccggaaagctgtgaaggataagcgtccgctttgtccggtataccgacttttttcaaatagtataaggccgtttcctttgcttcttcttttgattgcttgagcactttgatcggtgcgagcatgatgttttgcagaacggttttgtgcgggtacagatgaaaatgctgaaacaccatgccgatattccggcggacctgatttatatccgttttcttgtcacggatggagacgccgtttaccgttaaggcgcctccatcaactgtttccagctgattaatgcagcggagaagcgtgctttttcccgatcctgaaggtccgatgataacgacgacttccccttttttaatgtgcagattaatgtttttcagcacgtggaaatgtccgtagtgcttatttacatcctgaaatgaaatcatggccatcctccttaaaaaaacatgagtcatattgactggacagttttgaaatcctttaacacattacgatggttatacagacttttatgaatattatttagattatttcgtaatttctgataattatttccgtcaagaggtctgcgtcataaggcgtagtttatgaaacgggaataattccggctttctgtcaaaagataaagcaagaggtgaaacgtcatgcttcaaaaaccgctgcagctcttaatgtggacagctgtatgtctgctcgttttgttaacagtgtatgtcttttgcatgctcgatatgttatggtctcccatttggcttgttataaaatctctctttattcctatattcatcgcagtatttattgcttatcttttacttccgattactgaatggcttcatagaaaagggatgcctagaactttaagcctgcttctgatttattgcctgtttttcggcggaatcggctggggggtttataaaggggttcctgttttaattgaacagctgcaggatctgtctgagagcattcccggtcttgccgaaaactacaacagcatgctgaggcatctgcataatcacacggatcattggcctgacggcatgcaccatcggatggacaaaatgattcagcagacagaaacgtttcttgccggcacgattgaaagcacgatcagaagcatccgtttcgtgcttgattatatcctgatcgcggcgacgattccttttctcgtgttctatatggtgaaggatataggcgtcatgaaaaagacggtctggtatttgacgccgaagtcctggagaaaaagggggagtgaatttctgcgggatgtggacgactctctcggtgattacatccgcggtcagcttctcgtttgttttttgctcgggttaatagccggcgtttcattttggctcttcgggcttccttacccgctgattttgggccttgccatcgggattacgaatgtcatcccgtatttcggcccgtttatcggcgctgtgccggcgctgctcctttcgctggcgatttcctccaaggctgtgatcatcgtaatcgtcacgatttttattcttcaatttatagaaggaaacattttgagcccgctcattgtcgggcgaagtctcagaatgcaccccgtcgtgatcatgcttgcgcttcttgccggaggagagctcgcgggcattcccggcatgattctcgctgttccggcggcagccgttttaaaagtgacggccattcactttttgcggatcaggacggaacattgacattcgggttctgcttgtctataatttcgagtagaatacatacgaatctcgagtgacggataagagtacgccgaagccctgtttaagagagaagctccgatacgctgagaggagcttcagcagaagatcggccgaagctaatcctgagtgcagttaaaggctgccgcaatcctgcgttacgggatgaaaggtgacaggcctttttcggcctgtaatcagggtggtaccgcgagacagctctcgtccctgtgtgaacgcatggtttgcatagggagagagcttttttgctgtcgcaaaagagaatttcgggtagtgataaggaggaatatagatgaaacacttaacttctgctgaagtacgtcaaatgtttttagatttctttaaagaaaaaggtcatgccgttgaaccgagcgcctcattggttccgcatgaagatccgtctttactgtggatcaacagcggcgttgcgacgctgaaaaagtactttgacggccgcgttgtgccggagaatccgagaattgtaaacgcgcaaaaatcaatccgcacaaatgatattgaaaatgtggggaaaacggcgcgccaccacacgttctttgagatgctcggaaacttttccatcggtgattattttaaagaagaagccatcacgtgggcatgggagtttttaacgagcgaaaagtggatcggctttgatccggagctgctgtctgtaacggttcaccctgaggatgaagaagcttatacgctatgggcggaaaaaatcggcgttccggaagaaagaatcatccgtctggaagggaacttctgggatatcggcgaaggcccgagcggaccgaatacggaaattttctatgaccgcggcgagaaatacggtaatgacccgtcagattctgaattgtatccgggcggcgaaaatgaccgctatcttgaagtatggaacctggtattctcagagttcaaccacaacccggacggcacgtacacaccgcttccgaagaaaaacattgatacgggcatggggcttgaacggatggtctccgtgattcaggatgtcccgacaaactttgacactgatttgtttatgccgattattgaagcaacagagcgcatttccggagatgcttacggaaaggacgcaatgaaggatacggcctttaaagtgatcgccgatcatatcagaacggtcgcatttgcggtaagcgacggagctctgccgtcaaatgaagggcgcgggtatgtactgagacgcctcttgcgcagggcagtgcgatacgcgaaaaccatcggtatcagccgtccgtttatgtacgagctggtaccgactgttgcaggaattatggacgctttctatccggaggtgaaagaaaagcaagagtttatcgccaaagtcatcaaaacggaggaagagcgcttccacgaaacattaaacgaaggtctggccattttatctgacgtgataaagaaagagaaggaaaaaggcagcggcatcatctccggaaaagacgtattcaaactgtacgatacgtacggattcccggttgaattgacggaggaatacgcggaagatgagcaaatgaaggttgaccataaaggctttgaagccgaaatggaaaaacagcgtgaacgggcgagaaatgcgcgccaagatgtaggaagcatgcaggtgcagggcggcgcattgcgcgacattaccgcagaaagcacatttgtcggctacagtgccgtaaaagctgaagcgaaggtgatcgagcttcttcatgacgggcaattaatcagcgaggcgcatgaaggggataccgtccaaattcttcttgacaaaacgcctttctatgctgaaagcggcggacagatcggtgacagaggagtgctgagaagcgagcaggctgtcgtaaccattaaagacgtgaaaaaagctccgaacggccagcatgtacacgaaggcacggtggatagcggcacgattcaaaaaggcgcaagcgtgacggctgaagttgaagatcaaatgagaagcggtgtggtgaaaaaccatacagcaacccaccttctgcaccaggcgctgaaagacgttctcggcacacatgtcaaccaagcgggttcactcgttaccgaaaatcgtctgcgttttgacttctctcatttcggtcaagtgacgaaagaagaacttgaacgcattgaaggaatcgtcaacgaaaaaatctgggagagcattccggtagcgattgatttgaaaccgatcaatgaagcgaaagaaatgggcgcgatggccctgttcggcgagaaatacggcgatatcgtccgcgtcgtacaagtcggagattacagccttgagctttgcggcggatgccatgtcacgaatacggctgaaatcggtctgtttaaaatcgtatccgaatcagggatcggcgcaggtacgcgaagaatcgaagccgtaacaggaaaaggcgcttatcaggaaatgaacagccagctcagccttctgcagcacgctgcggatgagctgaaatcaaacgtaaaagacgtaccgaagcgaattcagtctcttcaagcggagctgaaggaagcgcaaagagaaaatgaatcattgctcagcaaacttggcaatgtggaagccggagccattctgtcaaaagtaaaagacatcggcggcgtaaaagtgctggctgaaaaagtaaatgcgaaagacatgaaccaccttcgtactatggtggatgatctgaaagcgaagctcggttctgcggtcatcattctcggcgccgtgcaaaacgagaaagtcaacctttcagcaggcgtgacgaaagacctgattgaaaaaggccttcacgccggcaaaatggtcaaacaagcggctgaagtctgcggaggcggaggcggaggccgtccggacatggcgcaggccggcggaaagcagcctgaaaaattggaagaggcgctcgcatctgcggaagattggataaaatccgttttataatcctttcaactagtgtagaatgatgataagatgaggacctcaggctgaactttgcctgcgaatttgggaaagaggtgcaaaacggtgagctcgtttgataaaacgatgaaatttaatttctccgatgattctgctgaaacaaacgtcgaagaagtgctgattacggtatatgatgcgcttcaggaaaaggggtacaatcctatcaaccagattgtcggatacttgctgtctggagatcctgcatacattcctaggcatcgcgacgcccggaacttaattcgcaaactggaacgtgacgaattaatcgaggaattggtaaaatcctatctagaacagcataaagaggcgtaaatacattcatgagaatattgggacttgatcttggaacgaaaacactcggcgtagctttaagcgatgaaatgggctggaccgctcagggcattgagacgataaaaataaacgaggctgaaggagattacggtctggaccgtttatccgagctgatgaaagactataatgtagagaagatcgtgctcggttttccgaaaaacatgaacgggacgatcggtccgagaggcgaagccagccaaacatttgcgaaactgcttgaaacagcgtacaatgtccctgttgtgctgtgggacgagcgtctgacgacgatggcggctgaaaaaatgctgatcgcggctgacgtcagcaggcaaaaacgaaaaaaagtcattgataaaatggcggctgtcatgatccttcaaggatatctggacagtttaaactaagaggtgaaagaaatggaacacggcgaaaaacatattacaattgtcgatgatcaaggcaacgaacagctttgcgaagtgctgttcacatttgaaaacgacacattcaacaaatcttacgtactttattatccgattgatgctcaagacgatgatgaaattgaaattcacgcttcaagcttcgaaccgaacgaaaacggtgaagacggcgaactgatgccgattgaaaccgatgaagagtgggaaatgatcgaagaaacgctgaacacgtttttagcggaagaagacgaagaataaaatgaacggaaaaagccggagcgcatatgcgcttcggcttttttttgtaataaattgccgaatgcacatgaatcatgtagtataagagctgttgggaggaaaatacttgtatgaatatcaatcagactaaaaattcatttccgcgtaaaaacaaaaaaacaacgataatactgtcctccgtgatcgctctgcttatcatcatttgcggtgcttttttctatggaaaatctctgctgtccccggttgacaaaggcagcaaaacggcagtcaatattaatattccgagcggttcttccgtttcggcaatcgctgaaattcttgaggatcagcatgtcatcaaaagcaaaaaagcatttcagctgtatgtgaagtataaaggcgcttccgggtttcaggcgggattttaccacctgaataaaggaatggatgcggatgcgattatcaaaaaactgaccgcgggatcaacgggatatgcctttcagatctccgttcctgaaggaaaacagcttacacagattgcggatgcgatcgcaaaagaaacatcatattcaaaagaagagatcatggcaaaactggatgacaaaacattcatcggcaaactgaaaaaacagtttcctgatacaataacggacgcactttcaaacaagaagctcaagcatccgctcgaaggctatctgtatccggccacatatccgtttaatgatccggatgcatcgcttgacacgattttgacggcaatggttcaggaaacaaatacccgtatcgaaacgtataaatctgaactggaaaaaaagaaactttccgtccataacgcgctgacgatggcatcgcttattgaagaagaagccaccgccaaagccgaccgtcacaaaatcgccagcgttttttacaacaggcttgcagaaaaaatgccgctgcagactgacccgacggtattatatgcggccggtaagcataaaagccgggtctactacaaagacctgaaaattgattctccgtttaatacgtataaacataaggggctgccgccgggaccgattgcaaatgccggtgattcatcatgggaagcggctctccgccctgacaaaacggattatctctatttccttgcaaaaccaaacggcgaggtcgttttcaccaaaacattaaaagaccataataaagcgaaggaaaagtatatttccaaaaaagacagcgaataaaaggagggcaaaagctctccttttattccattctgaaaggttttatgataaaatatatcgggttgtttacttatggataaagaagtgtcttaagagagtgtccccgcggattcgtcaggggcactcctttttagaacggaggctgtttgccgtgaatgatcggtatgaacaaataaacgagtatataaacgcgatgctgaagcctcggcctgataaagtgaaaaagcttgaagcctatgcaaaagagcaccatgttccgattatggaagaagcgggcattgaagtgctgcttcaaatgctgtcgattcaacaggcgaaaaacattttggaaatcggcgcggcaatcggatattccgccatacggatggcgcttgagcttccggatgcgaatatttacacgattgaacgggacgacaaacgctatgaagaagctgtgaacaatataaaagactttgaaatggaaaaccgggttcacgtaatgcacggggatgcgctggaactttctgagtctgtccgtgtcacggctccttatgatgccatttttatcgacgcggccaaaggccagtacacgaacttttttgagctctatgaaccgatgcttgcgccggatggagtcatttttacagacaatgttctgtttaaaggactggtggcacaaaatcactcggacattgagccgaaaagaagacggaagcttgttgaaaaaattgatcaatataaccaatggctgatgaaccggcctgactatcaaacggtcatactgccggtcggagacggcatcgccatcagtaaaaagaagaggtgaatgatcatgaaaaaacctgaacttttggtgactccgacttctgtacaggatattcttccgctcattcaagcgggcgcaacggccctgttagtcggagaacagagatacggcctgagactggccggtgaattttcaagagaagatataaaagaagccgtaaagacagctcatcaggaaggcgcgaaagtgtacgccgccgtcaatgctatttttcacaacgaaaaagtggacgagctgaacggctatcttgcctttttgcaggaggccggcgttgatgcggctgttttcggtgatccggccgttttaatggcggcgcgtgaagcggctcccgatcttaaactgcactggagcacggaaacaacgggtaccaactactattcctgcaattactggggacgcaaaggcgcacggcgggcagtgctggctaaggaattaaatatggacagcatcattgacataaaagaaaacgccgaagttgaaattgaaattcaaatccacggcatgacgtgcatgttccaatcaaagcgttctttagtgggccattacttcgaataccagggaaaagtcatggacatcgaacagaagaaaaaagaagcgggaatgtttctgcatgacaaggaacggggcaataaatacccgatttttgaagatgaaaacggcacgcacatcatgagcccgaacgatgtgtgcatgattgatgaattagaggacctgatggacgccggcatcgattctttcaaaatcgacggagttttgaagtctcctgaatacttaactgaagtgacccgcatgtacagagaagcaatcgatctgtgcttcgaaagccgagagacatacgaagagaaaaaagagagctggatagagcggattgaaagcattcagcctgtgaacagaagcatcgacacaggattcttctttaaagaaacggtctattaaaaaggagggtgcaacggatgacagccgtaaatcaaaccatttccaaagtcgtaaacggaaaacgcgtcattacgaaaaaacctgaactccttgctccggcaggaaaccttgaaaaattaaaaattgccgttcattacggagcggacgcggtttttatcggaggacaggaatacggactccgctcaaatgcggataacttctcaatagaagaaattgcagagggcgtagaatttgccaaaaaatacggggcaaaaatatatgtgacaacaaacattttcgcccataatgaaaatatggacggtctggaagaatacttaaaagcgttgggagacgcaaaagttgccggaattatcgtcgctgatccgctgattattgaaacatgccggagagtggccccggacgtagaaattcacctcagcacacagcagtccctttccaactggaaagcggtgcagttctggaaagaagaagggcttgaccgcgtggtgcttgcccgtgaaacgagcggactggaaattaaagaaatgaaggaaaaggtggacattgaaatcgaaacctttatccacggcgccatgtgtatcgcttattcaggacgatgcgtgctgagcaatcacatgacagcccgggattccaaccgcggcggctgctgtcagtcctgccgctgggattatgacctgtatcagacagacggtgcaaacgcggtcgcgctttatgacgaagaagacgctccgtttgcgatgagcccgaaagatttaaaattgattgaatccattccgcaaatgattgagatgggtatcgacagcctgaaaattgaaggccggatgaaatcgattcattacgttgcgacggttgtcagcgtgtatcgcaaagtcatcgacgcatactgcgctgatcctgaaaactttgtcattcaaaaagaatggctggatgagctggacaaatgtgcaaaccgggataccgcgcctgctttctttgaaggcacgcccgggtatgaagagcagatgttcggcgaacacggaaagaaaacaacatttgattttgccggtctcgtgctcgcgtatgacgaggaaactcaaatggtgacgctccagcagcgcaatttctttaaacaaggtgacgaagtggaatttttcggtcctgaaatcgacaatttcacattcacaatcggcactatttgggacgaagacggaaacgagcttgatgctgcccgccatcccctgcaaatcgttagatttaaagtagacaaaaagatttatccgagcaacatgatgagaaaggggaagtaatcaccaatgggtaagagtcctgtagttataggcatcgcaggaggttccggatcaggaaaaacaagcgtcacccgttccatctatgaacagtttaaaggacactcgattttaatgatccagcaagacctttattataaagaccaaagccatcttccgtttgaagaaaggctgaacacaaactatgatcacccgctcgcatttgataatgactatttaatcgagcatattcaagagcttttgaattaccggccgatagaaaagccgatttatgattataaactgcatacgcgttctgaggaaaccattccggttgagccgaaggatgtcattattctggaaggcattctcgttctcgaagataaaagacttcgcgacctcatggatatgaaactttatgtcgacacggacgcggatctccgtatcatcagacggattatgagagatattaacgaaagaggccgttcaatcgattctgtcattgagcagtatgtgtccgtcgtcagaccgatgcacaatcagtttgttgaaccgacgaaacgctacgcggacatcattattccggaaggcggacaaaaccacgtcgcaattgatctgatggtcacgaagattcaaacgatccttgaacaaaatgcaattttgtaataccatagcatagacataaataactcagaccatattatgtataggctggaagggaatgagacagttcccttctttccctgtttataaaccgaaacatttgcagaaaacacacattcagtttaagataaacagtacctatatgggagagaagaacgaggactgccctgtgttctcattcttgattttttcgtttatgctctcatacataatcacacgttattgttgagggacaaccaccaaggagtgaaggaacatggcacaagaaaaagtttttccgatgactcacgaaggaaaacaaaaacttgaacaagaattagagcaattgaaaacggttaaacgtaaagaagtagtagagcgcattaaaatcgcaagaagcttcggagatctgtcagagaactctgagtatgattccgcaaaagaagaacaggcatttgtggaagggcgcatcacgacgcttgaaaacatgatccgcaatgcgaaaatcatcgaggacgacggcggttcaaatgtagtcggtttgggaaaaaccgtatcattcatcgaattgcccgacggtgaagaagaatcttacacgattgtcggaagcgctgaagctgatccgtttgaaggaaaaatctcaaacgactcgccaatcgcaaaaagcctgctcggcagaaaagtggacgaagaagtgacagttcagacgccgggcggagaaatgctcgtgaaaattgtgaaaatttcataagatccgtttaacaatgaaacacctcgtccaaaatgtggatgaggtgttttttatgatcgtatcaaaaaggctgaaaacggccgtgatttgttttctgctcgtgtttttctttctgcttgcaaggctggctgaaattcagctgttttttacagaatctttttcaaaatccaatattaatctgattcaggaaagcgtcaagcagcggacggaagaagtccttatttcagacggccgcggctcttttcttgatcggaacggcaaagaactgaccggaaaaaagcagcctgccgtcatactgtttccctttctcgtgacgcaggattggccggttgaccgggtatcagacattctcggaatgaaacagggggagctcaggcagctgctgacggaagcaaaaaaaccggtgatcctgaacagcagaaaaataaaacatttgacgaaacaatccgtggcaaatatcaattctttgaaatatcccggcatttacggcgtatatatgaaagacagcaaagaaacaaacatagccgctcatctgttgggcgcgacaaaccaggaccctgagcttttgaaaaagaaataccccggcaggaaggaactgccgatcacggcaaaaatcgggacaagcgggatggagcggacatttgatgagtttttactggcggatcaggacacaaaacttttgtatcatgtcgacggaaggggaaaccctttattcggaatggacgtcaaatatacggctgaagcaaacgcgttttatccgctgcaagtcaaaacctccatcgaccgcaatattcaaaaagcaatggaagatgtattgaaagaccgcgggttaaaaaaggggggagccgtccttttagacattgaaaaaagcagtgtgctcggaatggtatcaaagcctgacgccgacatgtcaaagcagcagacactgcaaaattacatgctgacgccgatttatccgggatcagtgtttaaaacggtgatcgccgcagccgcaatagaacaaaacgaagtgaagccgggcacatcctttaactgcaatctcaacctgtacggagagccgggggatgataaaggcacgctcagttttggagaaagctttgcccaaagctgcaattatacgtttacaagtcttgcggaaaaattaatcaaaaaagatgattccgttattgaaaacatggcggagaaactaggtctcacacagcgggcgggctgggaaggcaagctgtaccgggaagacggattcagacagctgtataatgaaaaaagcggggtcatttggggagatgacaaagacaaaaccgtaaaaaaagccgtcgcacagacggcgatcgggcaaaaaaacgtgaaagtcacgcctcttgaagtcgccaatatgatggcggcgatcgcgcgcggcggtgagaaaaaacaagtcaaaatcgcggacaaaattgaatacaaaaacaaaacgacgatggcgtcattcaaagaacagccgttaaaaggggaaaacatcgacaaatatacggcgcagcagcttcaaaaaattctcagagaagtcgtcacctcaccgaaaggaaccggccgaaggtttcaggatctgccgtatgagatagcaggcaaatcgggaactgcccagacgggaatgttcacaaaagaaaaacagacgctttaccacaaatggtttgcgggatactttcccgcggacaagccgaaatacgctctcgtggtgctgcacatggacacgccgggggataaggctctgacaaatacagtgttttatgatattgttaaaaaggtacatgaaaatgaaacaaatcagacatagaacaaccgctcagcccatgttaaaatatatgctgagcaagagggataaaggagtgcagaatgattgagcaataaacaatctcgttttgaaaaccgtgataagcgcagaaaagcaaatatggtgcttaacattttaattgctatcgtatctattcttattgtcgtcgttgcagtcagcctcttcatcaacagtccgtcgagcgacgtgagcgaaaaagcggacacgagccagaagcaggaaacacctgcatcaggcaagacgaagcagacatccgatgaagacataaaagacagcaaaaaagatacggcatcagacgatgacaaaaaagataaacaggataaggacacatctgattcatcttcagactctgacagcaaaaaagacgatgattcatcgaaaagtgatgacagcagcaaaaaagactctgattcaagcgatccttttaaaggcgcaaaaataacagagggcggctcatcaagcgatgttgagaaaacaattgttaacccaaaatggaaagcggtcggaacaaagcagacgggagaacatgcggcgacgtatgactcaagctctgaagactggtccgaaatgcttgacgccatctcttacgcaacaggcgtgtcaaaagatcacatgacagtgctgtggctcggaaacaatggaagcccgcaagatgcgaagggtaaagttttagacaaaacgaacggcaaaaagtatcaggtcaccatcacttggaaagacaaaaaaggctggaagccgacaaaagtagaaacgttaaaataaccgcaaaaaagcagctgattattcagctgcttttttctgtcatacgtcagctgaaaaatgcaccgacgcgctgtaaaggattctgccgtcaacggccgtcacctgatgggatacagaacggacgcgaagcataatcgcctggttgttttcaatctgaacgtttattttcttttcaagctcctgcaaagatgccgcttcgaaaaattctactttatctttgattaaatccaattgaaaattcatcagtacagatcctcctgatttttcttctgagtcaatgaaagtataagcctttctgccgtaattgcgcaataatcccaaagtattttagtacccttccattcttttttgtgataggataggaactgttccacgattaatccatactatactcataggaattataaattatggagagtgaaaaatatgggccgtgaatttattccattatttgaagattgggcagcgacttatgatgccacagtgcacggggcagacaaacaatacgctgatgtttttaaagggtatgacaatattcttgacagcatcgtcgcactttcgggttctaacgttttagagttcggaccgggcacagggaatttaacggcgaaattagccgccgcgaacaaaaaggtgtttggtgtagaaccgtctccgtcaatgagaaaactggcggctgacaagctttctgacaaagccgtgttcagtgacggagattttctggagtttcccgctccgccttttcaaatagataccatcgtcagctcgtacgcctttcatcatttaaccgatgaagaaaagcaagcggctgtaaagcaatatggcacaatccttcagaagcatgataaaatagtgtttgccgataccgtctttaaagatcatgaagcttatgatgaaacaattaaaaaagcaatccgaaacggctatcatcaattagcggacgatttaaagacggaacattatccgacactcgggacaatgaaaaacatcttttcagaagagggatttgccgcgcggtttacgcagcaaaatgactttgtctggataatggaggcgattaaacggtaaatcgaagggattgtgtataaatgaaactggcagtcatcggagcaatggaagaggaagttacgattttaagaagcaaactgaaagacgcaaaacaagagatgatcgctcactgtgagtttacgacgggcagctatgaaggcgtcgaagttatcttgctgaaatcggggatcggaaaagtcaacgccgcgatcagcacgacgcttctgcttgaccgtttcaaacctgattatgtgattaacacaggctcagcgggcggttttcatcatacattgaatgtaggcgacgtcgtcatctcaacagatgtccgccatcatgacgtggatgtgacggcgtttgactatgaatacggacaggtgccgggtcttccggcagcatacaaagctgatgaaaagctgatcagtattactgaggaagcggtttctgaactgaacggcattcaagtcgccaaaggcacaatcgctacgggagattcttttatgaatgatccgaagcgggttgaagacgtacgcgccaaatttgcggatttgtacgcggttgaaatggaagctgcggctgtcgcacaggtgtgccaccagttcaaaacgccttttgttgtcatcagagctttatctgatattgccggaaaagaatctgacgtttcatttgataaatttttagaacaggctgccgttcattcaactgagcttgtcctgaatgtcatcaaacgaattcactaagcgggggattctcgttctcctccgcttttccaggaggaggacatatattgaacgtgataacagatattacagaactgatcggaaatacaccgctgctccgtctcaagcattttgatataccggagggaacagcggtttatgctaaacttgagatgatgaatccgggcggaagcattaaagacaggctgggcggaatgctcattgaagatgcgctacgcacgggaaaggtgaaaccgggcggtgttatcatcgaagcgactgccggaaacaccgggatcggactcgctctgtgcgccagaaagcatcagcttcgcgccgttttttgcgtcccggagcatttcagcagagaaaagcagcaaattatgaaagctctcggagcggacatcgtgcatacgccgagagaagaaggtatgcagggagccattcgaaaagcgcttgaactggagagagagattaataattcttatgccgttctgcaatttaaaaaccgagtaaatccattgacttactataaaacgatcggacctgaaatatggaacgcgctcggcggggatatccacacctttgtcgcaggagcgggttccggcggcacctttgccggtacggcagcttatttaaaggagaaaaatcctgccgtcaaaacggtgatcgttgaaccggaaggctcgatcctgaacggaggagagccgcatgcccataaaacggaaggcatcggcatggagtttatccctgattatatggacgagaaccattttgacgccatttacacagtggaagacgatacggcgttttcgcttgtcagagaagcggccgagaaagaaggcctcttaatcggaagctcttcaggggcggctctttatgcagcgcttgaagaagcgaaaaaagcgcccgccggatcaaatatcgtcactattttccctgacggcagcgatcgatatataagcaaaaacatttttcaaggaggtcagtaagatgaagaaaaaaacgctgatggtgcacggaggaattacgggagatgaaaaaacaggagcggtttccgtaccgatttatcaagtaagcacgtaccggcagccgaaagcgggcgagcatacgggttatgaatattcaagaacggccaatccgacgcggacggcgcttgaaagcttaattgcggagcttgaaggcggcgcggcgggatatgcgttcggctcaggcatggctgcgattactgccgtcatgatgctgtttgacagcggcgatcatgttattttgacggatgatgtatacggcggcacttaccgggtgatgacaggtgtgctgaaccgcttcggtattgaagcggactttgttgatacgagcagtgaagaaaaagtcaaaaaggccattcgcccgaatacgaaagccatttatatcgaaacaccgacaaacccgctattgaaagtgactgacctcaaactgatgtctgacatcgcaaaagaagcgggcgtattgcttatcgtcgataatacattttacacgccgtatttccagcagccgctcagctttggcgcggacatcgtgctgcacagcgcgacaaaatatctcggcggccacagcgatgtcgtcggcggcttagttgtgacggctgataaagagctcggtgaaaagcttcattacgtgcaaaactcaacgggcggcgttttaggaccgcaggattcatggcttttaatgagaggcattaaaacactgggactcagaatggatgccatcaatcacagcgccgggaaaatcgccgagctgcttgaagcgcatgatgccgttcagacgctctactatccgggatcagcgaaacatccgggccatgagctgacaaaagcgcaaagctccggtttcggcggaatgatttcctttgatatcggcagcagtgaacgcgtcgacgcgtttttagaaaaattgaacctgtttacaatcgctgaaagcttaggagcggttgaaagcttaatctccgtgccgtccagaatgacgcacgcttcgattccgcgcgaccgccggcttgcgcttggcattaccgacgggcttgtacggatctcagtcggtattgaggatactgaggatttaacggcggatgtgaaacaggcgcttgattcccttttataaagaatggatagatttacattctctgtcggctgtcagcttgtattataatgttggtagactataaaactggcaggtgaccttatatggagaagaaaagactgaaatcattaatagaagattttaagcattacgcatttattctgcttgcagtcagcaccttcatttatatcggcgcggttcttcccggacaagggctgactgcgggccagaaaatgctgatgtttgtaacggattgtgcatttttagcgggcgcttatttctgcgttgaccgttcacttatttataaaaagaggctggaagaggccgaagaataaaaaaagccattgtcttttgacaatggctttttcatttcttattcagaaggggtttcgcgtaattcttttcccattccttttaaaaactgcagcccgaagccgagcgcgcggttaatatcaggatcaccgacggctttcatcagttcaaacatactgactttcctgtcctcttttaaaaatctttgcgcctggtccgtcccggccatggcgctttctaaaagtctgcccataaattcgggatcagcttttgacagcgcgcctcccgcggccatcatcgtattcaggagattggtgacaggttcccgggaaatctgtccgagtgcgattttggcaatctcctcttttgcctggagcatatagccggcggcatcaaaaatgcccaagccattcagctctgccataatggacatcgttttcgcgacggcttcttcattttctgcgagaagcgtcttcagttcttccagtttttcagctttcagctgttcctctgttttcgtttctttttgaatttcagtaattgggcttgccattatgtttcctcctttccttaatcagttaggtgcacatagcccggacggttccattttcgctgagcttccacaccgttttgcggatgacgttttttgttccgcggattcgttttcggaagcggcggtgtatcacaggaaccgagcacttccatgcggacttttgtctgtttataggcaggtgtatgtgtccgtgaatcatacgcaggcccggtcaggaaattaatcgcagaatctttatctgtagagttcatcggcagataaagctcatttgcgcggacacggtctgtcacaagcgcattcaatttaaccgccccaaaaggagagacgagccggatcattgttccgtcgcaaattccgcgttcagccgcgagctccggcgatacttcaacaaatacatccggaactttagactgaatgccttttgacttgtttgtcatgtttccttcgtggaaatgttcaagcatccgtccgttgttaatatgcaggtcatattcttcagggaatacggcaggctccacccaatcgctcagcgcaaaacgggcttttttgtccgggaagttaaagccgtcttcataaagaagcggagtgctctctcccgtaaagcttccccacaggaagctgttccagccgctaagaacgtcgtagcttgcttttccgaacagcggagaaaggctcgccatttctgagaaaatgtcgcttggatgcgtgtaattccaatcagcgcctaaacgattggcaacctcctgaataatccaccagtcgggtttggcatcgccgagtgtcggaagcgcctgatacaatctttgtacacgacgctctgtgtttgtaaatgttccgtctttttcaagagatggaaccgcaggcaggatgacatccgcgtattgcgccgttcttgaaaggaaaatatcctgtacaacaaagaaatcaaggctggataaaatgtcatgaacatggttggcgtttgaatcgacgagcgccatatcttcaccgacgagatacatggctttcatgtttccttcttcaatcgcatggagcatttcaatattatcaagacccggcttgccgtcaatttcaacaccgtaagctttttcgaatttagcgcgtgccgcatcatcggtaatatgctgataccccggaagccagcctggaagagttcccatatcgcaagcgccttgaacgttgttatgtccccgcagcggataagctccggcgcccggacggcggtagtttcctgtggcaagcagcaggttggaaatcgccgctgatgtatcagagccgcctgtattctgggtaacgcccatgccccaaagaacacaagtgccgtctgcatcacgaatcatttcggcaatgcggatgatcgtatcctgagaaagtccggtgatgcgctccgcatattctaatgtatactttttcagcgtttctttataatcttcaaagtagttgacattctcatcaataaacgcttgatcgtgccagccttggtcaatcatatattttgtcactgccatgagccagacttggtcagtcccttgtttcgggctgataaagaggtcggaccgttcagccatttcatttctgcgcagatcggcaacaattaatttttgtccgtgcagcttatgtgcacgtttcacgcgtgtggccagaaccggatgtccttctgccggattggcgccgacgatgagcacgaggcccgcttttgcgatatctttaattgtgccggcgtcaccgcccataccgactgtgcggaataagccgtccgttgccggtgactggcagtagcgtgaacagttatccacgttgttggtttcaaatacttgacgcgctaatttttgaataacgtagttgtcttcattcgtaattttagaagaagaaataaaaccgacagaaccatttccgtgttcggccttgatcgaaccgagtcttgaagcgacaagatcaagagcttcttcccatgacgattcaacaaatgcgccgtttttccggataagcggttttgtaatccgttcttccgaatttacgaagtcccagccgaatttccctttcacacaagtggaaatcgcattaaccggagcatcggaaacaggctgaattttaaggatgtcacggccttttgtccatacttcaaaagagcatccgacgccgcagaacgtgcagactgtttttgtttttttcgtccgtttatcgcgcatagccgcttccacttctgacacggcgaagatgcttgtatagtcgggttcaacatttttcactaaatcaatcatcggttccatgacatcttcttttattcctgtcataaatccggcttggccgagcattgatttttccatcagtgcgttacaagggcagacagtgacacattggccgcagctgacgcaggatgattcattaatggggacgccttcatcccaaatgacccgcgggcggtcgcgctcccaatcaattgaaagggtctcattcacctgaaggttttgacacacttccacacattggccgcaggcaatgcattggttcggatcatagcggtaaaacgggtgagacatatcaaccgcgcactttgaatcatctttcggcgtatacggatatttctgatgctcaattcccatcatttccgctgtattatgcagtgtgcagttgccgttgttgttatcgcataccgtacagtaaagcaggtgattctcgagcaggcggtccatggcctctgtctgagcctcttttacccttcccgacgtaagcgagatggacatcccgttttctgcagccgtggaacaagagcgctgcaatttcccgtttacttcaacaatacaggtgtcacatgtttgaatcggatctacttccggtacatggcatatttgcggaatctcaattccgttttggtttaaaatatctaaaatcttagacccctctggtgcttcatactccgtgccgtcaattttgacacggatagactgaacgtctgtcacttccaattcccctccatcttttaaactcgaaaaaaagccatgcacatagataccggcctcctgtccggagaacggtataaatacgcatggcggaatagttcactagcaagtcttactaacagaccaatcctatttgtataaaacgatagactcataacacgtttcctattacaaatccatcttcactgcttttattataaggtgatatttattataatacaatacgaaaggaaaactttaaccaggtgaaatgtcacaaaggggaaccgggaatgtctttcataggctaaaatcggaggggacaatatgtctaaaaaaattcatgaatttaacgatattatccggaaattgcgcaaagaattatttggaaaggggccggaacgaattcacaccgtttttgtggataacatggcggtatcaacgctttacggcaatctaagcgcaagtgagcagtttatcgcacgcacgcctgaaggaagagaaatggttcatgcggcgcggaccagcttaattcaggaactgtattcaaaacaaacgcctgacggaatggaagagctcatcggagcaaagctcgtgcatctgttttcagacatcaagatcgaagagaatattgcggtgtctgtatttgtctttgaccgaacaattgaagagcgccgtgaagaaatcaaaagctgaaaaaaattcaattgacacgaaattgtcacatttgatatgatatgaactgcctgcagtggcttaaggacgaattttatggaatgtgtgcatgatctgtacattttctatagctgatattttcattctgcttgatattgttgtatgggtatgcatacaagttaggcagcattcaaacccgttttagacgggctgtttgaatgctgccttttttgttaggcgtctttggaaactgcggggctgaaatgataaatggaggggttattatggcttttcgtaaaccggacgaaatagcggagcttgcggtcgaatcaggggtaaaaaaggtgcattcaccgctttcagcactgattgtattaggatttttgggaggagcgtttatcgcactcggttatttgcttgatatccgtgtcatcggcgaccttccgaaagaatggggaagcttgtcgagtttaatcggggcgtccgtgtttcccatcggattggtgctcgtcgttcttgccggcgcggagctgattacgggtaatatgatgtcggtatctatggcgcttttttccagaagaatatccgccggtgcattagtgaaaaattgggtgatcgtgacgttgatgaatcttgtcggcgcactgtttgtcgcttactttttcggacatgttgtcggattaaccgaaacaggaccttacttggaaaaaacgattgcggtcgcacaaggcaaattggatatgccgtttggaaaagttattgtttcggcgatcggctgtaactggcttgtctgtttggccgtctggctttctttcggcgcagaagacggagccggaaaaatcgcgggtatatggtttccgattatggcgtttgtcgcgattggttttcagcacgttgtagccaatatgtttatcatcccggctgcgatttttgcaggttctttttcgtggggtgatctgattggcaatctcattccggcctttatcgggaatgtaatcggcggggcagtgtttgtcggccttatttattttattgcatattcaaaaaaagatcagaaaaagcaagggatgaaaagagtttcctgaggtaagaaagatgccggaaaacaaggacaattgaagcggaatgccagcacattttccgtccaaatcttgaaaaaaatgtttacaaaatggaagctgatggatatacttacaaagtaagaaaaaagcaaagggaggttgaatcacatgacgactttaaacggcaatcaaaatttacaattgaaccgattcagcctgtggaagagttcgtgtccttccttaacctctgcccgtcaagcacgttaatttcggagtatcaggacattcgcagctccccgcagggaaagaagcacgtcttcttttgtctgcggatttagtctgcccgcagcgcatatgaagtttgctgcgggttattttcgcttgtgcggatattgaaagggggtgagcgataatgaccattaatcttttctttttaacactgaccatttcaaagcgttttaaaagtgcggaagagtatgaacgagaacagcaggtcgaagagttttataatgaagcgaaagaacgccagctgaaacacttttatatgaactgaacggacacgaagggccaaaacggaggagaaggaggagatcatcatgttcagaattgaactgctgaatcattacacaatggagaaggaccaggtttagcgaggatgttgctgtcacgtcgcagacggcctgcataccatggtaaagaaagaaaaattggtaagcgggtgatagcatgcaaggcggtcagaacagaattccatccatcgggcacgggtatgcgtcaatgccccattcatttaaacacggctacggcaacccgtatcgccggcagagaatggcggcgctttcccggcagacaagatatatagcaccgtattattggtactagagcaggcggaaaacctacgttttccgtcttttttttatgaaaacaaatataaatttcaaataaatcgaaacgttcatgaagagaagtgcgtctagttagtacctcatactaatacgaggtaatattatttctgaataataaatcacaggaatggaaaagcgggtgttatacaatgttgcaacatacatcttcagcattaaaacgaatgcgcgcgaaatactttgctgcatcagaactggcagagtcagtcattcagcaaatcttgatggacatacaggaatacgaccgcattttggaaatcgggaccggaaacggctcaatgtttaaacaaatcatcggacagcttgaaaagggcagtcttaaaagcatagaaacatcgaaacgtaaaatacggaaaacacagcgcgcaaaccgttcggttataaaagccgggcgcggaaacattcagcaggggaggcctgaaagcttaccgttccgcgatcgcagctttcataaagttttctcattacatactgctgaaacagtcagcgattacaggacagcatgtaaagaagtgtaccgcgttcttcaaattgacgggtgtttctatatggttttgaaaccttcgcggatgagtgagaaggatgtgattgaggtgctctatgatcagcatttcagagacatttcagttgtcagcagagattcattccattttattactgccattaaatagaatatttcttgggaaataaaaagagctgcttaagtcactgcagctctttttgtgaaattgggcatatttccttatttttggttatttcacatctattttatattaaaaaaagtttttttcttatacaatggtaatcagatgaccgtacattttaaatgttttgaacaaacggaatgaatattcattccgcatctggaaagggggatgaaatgacagcttcaaacaaggttgaactcattatgaaagcgtcgcttactttgtttacagatagaggatttgacgcaacgacgattccgatgattgccgctcaggccgatgtcggaaccggcacaatctaccgttactttgacagtaaagagacacttgtgaacgtactgtatcaggaaagtgcgcagcgttttatgaaaaaagtcaaaacggactttcagggtatctctgtaagagaagggtttcatcacctgttttattgtctgattgattttacgaaggaaagtgagtatgcattgttttttcttgaaacgaataaggacgcctactttctgaatgaaacgagccgtaagcttcttgatgaaataacacagatgcttgacgtcttttttcagcgcggcaagtctgaaggtgtgctccgcaatctgccgtccaatgtgctgatggcgctgctgctcggggcatatctcaaactctatcagcttatccggacgggaagcgtcgaaataacaaaaccgtttctgaaagaattggaacaatgttcttgggatgccatcagaactcattaactattcgccgaaggaaggaagatcgatatgaaacagctaagcgctataccgcagccgaaaacatacggacctctgaaaaatctccctcacttggaaaaagaaaaactgtcacaatcgctctggaaaattgccgaagaatacggcccgatctttcgtttcgaatttccgagctctgtcggggtcttcgtctcaggccgcgagctcgcggcagaagtctgtgatgaaaagcgatttgataaaaacctcagcaaagccttgctgaaagtccgtgagtttggcggtgacggactatttacgagctggactcacgaaaagaattggcagaaagcgcatcggattttattgccgagcttcagccagaaggcgatgaaaggctatcattcaatgatgcttgatattgccatgcagcttgtgcagaagtggagcagattaaatccgaatgaagaaattgacgttgccgaagatatgacgcgcctgacgctggatacaatcggcctgtgcggatttcattaccgctttaacagcttttaccgcgacacacagcatccttttatcacaagtatgcttcgcgcgctgcaggaggcaatgcgccaatcacagagacacagcctgcaggacaagctgatgatcaaaacgagacatcagttccagcaggatattgaagtgatgaatgaactcgtagaccggatcatcgctgagcggagggaaaatccggatgagaatctgtctgatcttttagcattgatgcttgaagcgaaagatcctgtaacgggtgaaaggctggatgatgaaaatatccgctatcaaatcattacctttttgatcgcggggcatgaaaccacaagcggactgctttcattcgcgatttactgcctgctgaaaaataaagataaattgaaaaaagccgttcaggaagccgagcgggtgctgacgggagagacacctgaatataagcagattcagcagctgacatatacccgcatggtgttgaacgagactttacggctgtatccgactgccccggcattttccctgtacgcgaaagaagatacggttctcggcgggaaatatccgattgcgaaaggacagccggtgacgattctgactccgcagcttcaccgggataaaagcgcgtggggagaagatgccgagctattccgtccggaaaggttcagcgatcccgcggcaattccggctgatgcgtataagccgttcggaaacggacagcgcgcatgcatcgggatgcagtttgccctgcaggaagcgacaatggtgctcggccttgtccttaaacactttgaactgattgatcatactgattatgagcttacgattaaagaagctttaaccattaagcccggtgattttaaaatccgtgtaaaaaacaaggacgtgtccaatcatcagcccgtacaaaaccataaagctgaaggcggcggtcacaaagaagaaacgaaagaaatcccgtcccacggaacgccgcttctcattctttacggatcaaatttaggaactgcggaaggaatcgcggaagagctggctgacatcggcagaagcaaaggattttcaactgaaaccggcccgctcgatgattatgccgggaaactgcctgtaaaaggcgcagtcgttattgtgacggcttcttataacggggcgccgcctgataatgcggcgggttttgtgaaatggatggaaacccttgaagatcaggaattaaagggtgtttcttacgccgtcttcggctgcggagaccgtaactgggccgccacttaccagagggtaccccgcctgatagacaaagtgcttgaagaaaaaggggcaaaacggctgacttctatcggggagggcgacaatgccgatgattttgagtacagtcaggaagcctgggaagactcattctggaaggacatcatgaaggcttttcatatagaggccgctccaaaacaggcaaacaaatcacagttatcaatcgaatacgtaagtgaagcagccgagacgccgattgccaaaacgtacaaagcatttgaggcggaagtcatcacaaacaaagagcttcataccgaaagcagcaagcgttcagtccggcatattgagctgcgtctcccgaagaccgaaacgtatcgggaaggagaccatctcggggtgcttccgcaaaacagcggggaactgatcagccgtgtcattcgccgattcggtctcgacccaaatcagcactttaagatcaagggccggcagctgcctcatctgccgatggaccggccggttaatgcgccggagcttttggcgtcatatgtagagctgcaggaaccggcaacgagagcccagcttcgcgaacttgccgcccataccgtgtgcccgccgcaccaaaaagaattggagcatctttattctgacgatgcggcatataaagaaaacgtgctgaaaaaacgaatgaccatgctggacctgctggaagattatccggcgtgtgaactgccgtttgagcgctttttagaacttctgccgtccttaaaggcgcgctattattcaatctcaagctcaccgaaggcaaacaaaagggagctcagtatcacggtcggcgttgtgacggctccggcgtggagcggccggggagaatacaagggcgtggcttcgaactatttagccggattacaaaatggcgattctgccgtctgtttcatccgctcgccgcagtcgggtttcgcattgcccgaaattacgaaaacgcctctcattatgatcggagcaggcaccggaattgcaccgttcaggggatttatccaggcgcgggctgcagaaaaaatgtccggtaacagcctgggcgaagctcatttatacttcggctgcagacaccctgaagaagacgatctgtacaaagatgaattcgaccatgcggagaaaaacggccttgtcaccgtgcatcgggcgtattccagattagatcaggactgtaaagtttacgtacaggatgtcctgcttcgcgaggctgcacagattattgcgcttcttgaccaaggcggccatctctatatatgcggagacggaagcaaaatggctccggctgtcgaaaatgtactgcttcaggcgtatgaaaaggtgcataacactgattcaaaagtttcctcgaattggcttgaacagctgcaggcggaaggaagatatgcgaaagatgtttgggcaggtgtgtaacagaagcgtaaggcaattgaagattgtgttttaattgaagaaagccggcacgatatttgaaatctactgaatcaaaaggaatagttatagggagtatcgtgccggccttatctttagtatcggacaaaagacacaaatctttaatgtttttattgatttacatgcaggcggctatgtcccttttttctgaattccgccagaaataaaaccggataagacagcaatagcaaaaccgaaataaatgaaatgataccgatccaatgaaaatgcgtccaaaagaaaccgccgcaagacccggccgcgcttgacccgatatagtatgcaagcagatataatgaagaagcttgcgcgcgctgatcaccggctgctcggccgacccaggcgcttgcaattgaatgtgcgccgaaaaagccgaaggtaaacacggcaatgcccgcaattttaagggcaagctggggcaaaagtgtcaccgctgcgccggcaagcataacaaaaatcgcaatcttaatcatttttgcacttccgaaaagatctgcttttttccccatatagacagagctgaacgttcccgcgagatagacaataaaaataaaaccgattacagtctgtgacaaatgataaggagccgccattaaatgaaagccgatataattatataatgtcacaaaactccccattaatataaatcccagagatattaacaaaagcagccgtttgcggtgtagaaccgctccgtattccttacatgccgcttttacgcccgcatgccgctgagatgaatggcgcggagccggaagaaaacgccaaaacaaatagcttaatataatagaaagaatgccgataatggcaagcgccggccgccagccgaatacatcagtcagaagccccgttaacagcctgccgctcattcccccgatgcttgtgccgctgatatacaggcccatcattttcccgaggcccttcggatcaaactcctcgcctacatatgtcatagcgacagcaggaacgcctgccagaaaaataccgagcagccccctcatcgccaaaagcgccggaaaagccggactgaacgctgttaatagacctaaaacagaagtggctgttaacgacagcaccattaatttttttctgccgaatccgtcagacaacgaagcagcggccaataatgaaaatgccaaaacggctgttgagatggataaagttaagctggcagccgcagcggaaatatgaaactcttccgaaaacaaaggcataagcggctgtgtcgtgtaaagcgtggcaaatgtcacaaagccgctgataaacagtgccaagctggcctttctgtaagcctttgtatgaggctgaataaacgtcatgaatgtccctcttttctcactgttggttatatatgtatcgtacgcttttcatttcaatgtgtctaatttataataactatagaattaatgcgtgtaggttatgaagaaaggggagaaggagaaaatggagcttcatcaaattgacaacttcattgcggcggcaactcatcagcatttcacaaatgcggcaaaagaaagaatgatttctcagccggcattaagccgatcgattatcaggctcgaagaagaattaggcgcgccgttattttacagagagacaaaagccgtccggctgacaaggcacggagagcagttcttaataaaagcaaaacaagcgagacgagctttaaatgaaggcgttgaacaagtgaaaaaaaatatgagcctggagcacggcgaaatatctgtatcttttcttcatacgctcgggttgcgcttgatgcctcagctgattgccgaatttaaaaagctatacccaaacgtgaccttccggctgtatcaaggcgcaaatgaaacgcttcgcaaaatggtggaaacgggagatgcggatatctgtctcagctccccgccgcttcccagcgagcttttacaatggacagtgctggagaaagagcctctttatgcggtgcttcctgagaaccacccgcttgcagaaaataaaagcattcaaatgaaagagatgcaggacgaggattttgtcggatttaaaccgggatacgggctgagatatatgtttgatctgatgtgccgggatttgaatatacacccgcatctcgcatttgaaggagaggaagtgtcaaccatattagggctgaccgccgcgggtcttggggctgcagtgctgccgaaaaccgcggagcattcatactttccggtcgtttttctcccggttgcagattaccaatgcgaacgcaccatagcgttagcccagttaaaaaaccatgctctctctcccgctgctgagcgttttaaacagtttgcacttgattattacaaagcacgcaactgagcggtcattttattaaaatcgaagttgaaaataaagcagaaagaaatacagaaaacggaggataaccatggcgaaaaaaacagtgaaaacaaatgctgtccgtatcattgagcagcaaaacattccctatgagctattaggttacaaaacagaagggggacagcccgcagacggtctttccgtttcacaaaaaatcggatactctgccgaatatgtttataaaaccttagtggcatctgcaggaactgatcgttattacgtctttgtcgttcccgttgcaaaagaactgaatctgaaaaaggctgcgaaggcggcaggtgagaagaaaatagaaatgattgccatgaaggaccttttgggagtgaccggctatatacgcggcggctgctctccgatcggaatgaaaaaaaggtttcctacttttattgatagatccgctgaaacactggcgtttatgattgtcagtgcggggaaaatcggaatgcagctaaaagtagcgcctcatgatttagccgaagcaagcggggcggtatttacagacattgtataaatgtccggtggatctaatggaatacacgtttcaagggagaatgataatgaaaaaaagatatgaaaacttgaatggcgtgaagaatgaacatggattcatggacatgtggaaatggatgaaagaacgaagagaaaaaagtaaagatttaagcgagaatattccgaaagcggtcacaagggatgtccgtgatgttgccgtcaatcggacggaaaccgccataacatggatcggccattcttcatttctgatccaaatacaggggcttaacataatgaccgaccctgtatgggcgcggaggatgggttttcaaaaacggctgacagagccgggatatgaattgagcgaactgcctgacattgatgccgtgctcatctcacatgggcattatgaccatcttgattttccgagtataaaaaaactgagaggaaacccggatttttacgtgcctgcgggattgaaaaagctgttcatcaaaaaaggccgcaaaaaggttcatgaaatgaattggtggggtcgttttgagatgcggggggtgaatatatcatttgttccggcccagcactggacccggagaacgctttgggataccgatacttctcattggggaggctgggtcatagaaagcgaaaacggcgagtccatctattttgcaggagatacaggctattttgaaggctttaaagaaatcggagagaggtttcgtattaaggcggccctgatgccgatcggagcatacgaacccgaatggtttatgaaagtgtcacatatcaatccggaagacgccgtgaaagcttttttagagctgaaggctgacagcttcattcccatgcattacggggcattccggcttgctgatgatacaggcccggaagcattaagcagactgcacggtgagtgggaccggcttgcattacctcctgaaaacctgagagcattagcgcttggcgaaacattttggctgtaacagcaggttttcgctgccgacaccaatcgtttaaaaacggttggtgttttgttgtcaaccaaaggtgaacagcctcagtataaaacatgatttttccggaatctgcggtaaaaaacaaaactttttactcttttgtttcactatacaatgaaaacggtttcgtatgcgcggtatatttaacctatcacaattgctccagcagaaacggacaggaaggatagaaaaacagatgaaatacatgaattcaagacagaaaaagattttgtatctgttgttatctgaacctgatgactacttagttgtgcaagatttcgcagacagggtccgctgttctgaaaaaacgatcaggaatgatttgaaaacgattgaagatttcctgaatgaacatgctcaagctcagctgatccgtaaaccgggattaggcgtctatttacatatatctgaacaggaaagatcacggttaagccggcacatttataatgagcactttacatgcaggcacaagaccgatgaagaaagaatacttcacatcgcttatgatttattaatgaattcaaagcccgtttccgcaaaagaaattgccgcacagcattttgtaaacagagcttccattaaaaaggatatcagtgcggttgaagagtggctgaagcgatttgatctcacactggtttctaaacagcggctcggcttaaagattgaaggggacgaaaaaaacaaaagaaaagcattggcgcgaatttcagatttgattgataatgcggagtttacaagccaatttataaaaagtaagtttttaagtcatgaagcggactttgtgagaaaagaaatcaagttattacaaaaaaaccattctatctattttacggatgaaacatttgaaagtttgctgctgcatacattgctgaccatccgccgtatcaaaatgaaacagccggtcgccatctctgcaaggcagctggaggcggtaaaaaagaagaaagaatatgaatggacactggcttgtttaaaacggcttgagccggtatttgccatccggtttcccgaggaagaagccgtctatttaactttacatataataggcgggaaagtgcgctatccattgcagcaagaaaagaagcttgatcttgaagattctgagctttccaaagtcgtcaggcatttgatcaatcgcgtttcagaactgaaaatgctggatttccataaagaccaggaattgatcaatggattgaacattcatctcgatccggtgttgaagcggctgagctatgatctctctgtttcaaaccccatgctccacgacatcaaaaaaatgtatccttatttgtttcatcttatcattgacgttttagaagacatcaatcaaacatttgatctttatattcctgaagaagaggcggcctatttgaccctgcattttcaggcagcgatcgaacggctgcgccgaagcagtcataaccctaaaaggacgatcatcgtctgccatatgggcattggcatgtcgcaattgctgcggactaaaattgaacgcaaatttcatcacattacgataaaagactgtatcgcaaaagcggaactgacagagtatatcaaaaagcataaagatatagatttcgtcatttctacgatagggcttggaaatgtaacgatccctcatatcgtcgtatcaccgcttttggagcctgctgatgaaaagaagctcagcgcatttatgcaacagcttgatacatcacaccgccgggagcaaaaaacgtttaaaatgctgaatgatacgactccgtttctcgtttttttacagcaagagacagagcaccgttatcaggtcattgaaaagctggcgcaggctttgtatgaaaaaggctatgtagaaaaagagtatggcattcatgcagtaatgagagaaaaaatgtcggcgacaaatatcggggcgggtattgccatccctcacgcgaactctaaatatatcaaacaatcagccattgcaatcgccaccttaaaagagcccattgagtgggggacggaaaaggtgtcgcttgtatttatgcttgccgtcaaacacgaagatcaaaacaaggtaaagcaattattcagtgagctttcctatcttagcgagcagccggcatttattcaaaaactgacggaagaaaaaaatgtgatgacgtttttatcgtatttaaactattaaaagcaggggatggctccctgctttttttctgtttatagggaaaaatgccgttatttccggaacttatggtaaaaaaacgcgcttatcacaggctgatttcagtataaagttgagacaagatcttgaaattcagactgcaaaggaggatttatatgaaactgttagcgattacatcatgtccgaacggcattgcccatacgtatatggctgctgaaaatttacaaaaagcagccggcagattaggcgttgagatcaaagtggaaacccagggcggaatcggggtggaaaataggctgaccgaagaggaaatccgggaagcagacgcaatcattatcgcggcggaccgttcggtgaacaaagaccgattcgcgggaaaaaagctgctggccgtcggggttcaggaaggcatccgcaaaccggaagaattaattcaaagagcgcttagcggtgaagtgccggtctatcaatctgcttcaaaaactgaatccgcaagtcagcagggcaaaaaacaaaacccgatttaccgtcatttaatgaacggcgtttcttttatggttcctttcattgtcgtcggcggattattgatagcggttgcattgacgcttggaggagaaaaaacaccaaagggcttagtcattccggatgcgtctttttggaaaacgattgaacagatcggcagcgcttctttttcattcatgatcccgattttagccgggtacatcgcgttcagcatcgccgataagccgggtcttgtccccggaatgatcggcggatatattgcggcatccggcagcttttacgacagtgcgagcggcgcaggatttcttggaggaatcattgcgggatttttggcgggatatgcggcgcttggaatcaaaaaatgtaaagttcctaaagcaatacagccgattatgccgatcattattattccggtgtttgcctcactgatcgtcggtttggcgtttgtatttctgatcggcgcccccgtcgctcatattttcgcatcattaacggtttggcttgcgggaatgaaaggctcgagctcaattctcctggcattgattttaggagcgatgatctcctttgatatgggaggacccgtaaacaaggtggcctttctattcggatcggcaatgatcggagaaggaaattatgaaattatgggcccgattgccgtttccatttgtataccgccgatagggcttgggattgcgacgtttttaggaaaaagaaaattcgccgccgcagaaaaagaaatgggaaaagcgtcatttacgatgggccttttcggtatcacggaaggagccattccatttgcggcccaagatccccttcgtgtgatcccgagtattatggcgggttctatgaccggctcggtgatagcgatgatcggccatgtgggggacagagtggcacacggcggccccatcgttgctgtacttggagcagtagatcatgtattgatgttttttatcgctgtaacagcaggctctcttgtcaccgctctgttggttaatgtactgaagaaagatatggcgaaatcccccgcgcccggtgaggtgctgccgtctgccgcaccaaatgaagctgcagcggcaaaagaaacaaaggaaccatctcaggctgacagccgaaaagccgggatgaccgaaatcaaaaaactgactgacattatcagcacggacttgattgaaccgcatttatccggcgaaacgagggatgacattatcgatgaaatgatcgagaaattgtcccgtaaaggtatgcttctgtctgacagcggatttaaacaggccattttgagccgtgaacagcagggaaccacggcgataggtatgaatatcgccattccgcacggaaagtctgatgccgtcagaacgccgggtgtcgcattcggaataagacgttcgggtgttgactggaacagccttgatggttctgatgcaaaactgatttttatgattgccgtaccgaaggaaagcggcggaaatcagcatctgaaaatattgcagatgttatcccgaaaactgatggatgacagctatcgggaaaggctgctctccgttcagacaaaagaagaggcgtatgggcttctggaagaaatcgaataaagcgggggatgatcatgtctactgaaccgatatttttcaatccggttttcaaagaaagaatttggggaggcgccgccctgcgtgatttccactataatattccgtccgagcggacaggggagtgctgggcctttgccgctcatcaaaatggacagagcacagttcgaaacggcatgtataaaggatgtacgctcggtgaattgtgggagcatcacagagatttattcggaaaccttgaaggagaccgttttcctcttcttacaaaaattttggatgcggaccaagatctgtccgttcaggtgcatccggatgatgactttgccaaaatgcatgaaaacggggaacttggaaaaaccgaatgctggtatatcattgattgtgaaaaagatgcggagatcattttcggccacagcgcaacaacaaaagaagaactgatatccatgattgagcgcggagaatgggacggacttctgaacagagttaaggtaaagccgggagatttcttctttgtcccaagcggcaccgttcacgcgattggaaagggcacacttattttagagacgcagcaaaattcagatacgacttacagattgtatgattacggaagaaaagatgcggacggcaggctgcgcgagctccatttggaaaaaagtatagaagtgacagacgttccatctgtccgtgaacggccgaccgttcaatataaacaaacagatgatctgctggcagctgttttaatagaatgtccttatttttcagtcgaaaagtgggatgtaaaaggtgaagcgaatttattccagaatcatcccttccttcttgtcagcgtgatcgaaggagacggaataataattgcaggcgggcatgaacatccctttagaaaaggagatcacattctcctgccttccggtttgggagaatataaactggcgggccatgcaaagtgtattgtgtctcatctgtaatcttcaaaacccttctctggcagcagagaagggtttttcatcacttttacaaaaaggccgaaatttccgtggtccgttcctgaatttaatctctcaatttgtatatctcccgagccattgattcaagtatgtacatagcggggatttgggtggtgatattcgcattttcaacccattcttccgtcacgtaatatgaaatattcacatcagacattttggcaatggttgaatgtttatgatttgtaatactgatgacccggcttccttcttgtttcagctgattcagatgagtcaccgtagaatctccttcacctgaaaccgataatgcgatcgtgatgctgttatggcggaaatgggaatgggccggaaagtaaggatctttaatatacattgaaagtttccctaagcacgaaaaatatctggctccgtattcggcgagaattcctgaactacccactccgataaaaatgacgctttctgcatcggctgcaagggctgctgcttccttcagcttttcttccatccctccgcttactgttctttcaaaaaactcggcaacggaatgatggggactctttaaaatcgtttttttatttgcctccgcatacattttcagcttcaccttaaactccgaaaacccttcacagtttatttttttgcagaaacgtaaaatagaagccgtcgatacatgggtttcatttgccaattcacggattcgcatatagacgactttctcgctgttttgggagatgtagttgtataaagaagtttcaagctcgttaaatgaagcaatcatttcgtgtgtgaacatgcagggggattctcctttttatgagaatggtgaatgtacatctcatcgtaacatatcatttttaaaagaaacatagtgttatatttatgtgacaaatcactttttgtgtcattcaaaacaagacgtcagccaatgatttacggtgcaaaacaactgcggatataattcgttcatacgcttatgcatgatctcttcaagggtctctgacaaaagcggtcgaaaaaaggaggacaatatgagtatcaaactgatagcggttgatatggacggaacgtttttgaatgatgaaatggcatataacaaagagcgttttatgaatcagtatcgtgaattaaaagcgcggggaattaaatttgccgtagcaagcggaaaccaatatgcgcagcttacatccttctttccggaaatcaaaagtgaaatcgctttcgttgccgagaatggcgctttcgtcgtgaatgccggagaagaattattcgcgggtaacatgtctgaagacactataaaagaggtgatccgtgctttagagcagtatgaggtgaaaaacgtcattgtctgcggaaaaaaaagcgcgtatattcatgaaaatgccagtgaggatgaatatctgcatgccagtaagtattattatgtgttaaaaagggtgccgcattttgaaaacatcgatgatgacattttaaaattttccatcagttttcccgccgaacattgttccgcacttctgaggcatttaaaagacgccatcgggtctttcgtcacgcctgtatcaagcgggcacggtgacatagatctgatcataccggggcttcataaagcaagcgggattaggcttctccagaaacaatgggggataaatgatgaagaatgtgcggccttcggagacagcggcaatgatttggagatggtgtctgccgtgaaatacggagtcgctatggataatgcgcaggaaagcattaaacaggccgcggcgcatatcgcgcaatcaaacaatgaggaaggggtcttaaacgcgattgattccattctcaaatgtgaaaaaccctttgtctgaaaaagacattttaactgcggaggtgctgaacgatgattaaattagtgattacggatttagacggcacatttttaaataatcaaggcgattttgacagaacgttatttgaaaagacaaaacgagtaatggaagaacagcatgtcgctttcgccatctgcaccgggaaacagtgtgaaagggtggaagccttattcggagaagacgcgaaagatttttggattttaggagacagtgccgcacgtatgaaaaagaacggcaaattcgtatatgaatctttgatcagcaataaagccggactgtcaattataggcgctttagaaaaaatcagctgcgggcacaccattatcgcgtgcacaaaaaaaggcgcgatcgtaaaagaaaatctgtctgaaagtgaaatgaaatatgtaaatgcctcttatgcacatgtaacgaaaataactgattttactgagataaaagacgattttatcaagattacggttcatgaccccgacgccaactgtccggaaacgagagaaaagctgcatgaattttttcaccaattatatatcgtagcatcagaagatacctggatggacatatcaaatatcggaatacataaaggatcaacagtacaagaactgcagcgattattaggggtttcggctgatgaaacaatggcattcggagacggccgcaatgacaaagaattgatggaagcggcttcctacagctttgcggttaagaacgccattgacgaaataaaagatgcggcgcactttgtcatcaaatcaaatgacgaaagcagcgtcatgcacacgattatgagaatattagcgctgcaaaaacaatgagaaagcagatgggctaaagccaatgcggcaggacttactaggaaaagaaaaagcgggctatcctccgactttaaatcactcctgattttccgaaaatatgttaaaaatgaataaatatctatatttgacccaattgtattggtataatatgtataaaatgaatgaaacggcgtaatatcaagatgaaataaatcacttcatatcatttgatatcagacaaaaagtaggaacttcctcgttttgaaattgggaggtgtttgtattagcccgctgttgagtcccgcgtatatcattctcatttttcttccagcagcttcttttctgttagggattttaggatatttcatcttcaaaaaagtatggatgatggttgttattgtattcattttgtccttgatatttatgtttattgtaataggtgccgaaccgacatttttcatttgggtggctatgatgacggggagctgttttatctccggttcaatcactaagacggtatggacttttgtaaagcgaaaatattagacacagaagaatcctgtttgaacagctatccttttttgccgattgaagaaaaggaagtatagagtgatctgttatgttcttatattttgtctgttattgtattgtctgtgtatcgttttgttcttttttaactaaacggagcgctataattgaactgcagatatatagaaacacaaaaaaggataaggaggatttttatgtttcaaaccttagaccattttttgaaatcttgggaattcgaagccgatgcgacacaaaaactgctgaatcatctgactgatgaatcacttaaacaagaaatcacttcacaacattggactttaggccgtattgcatggcatactgtcgcggccattcatatcattacctcgaacacagatttaacgttccacgctccggctgaagattatcctgttcctgcatcggcgcggtttattgctgagagttatcatcaagccagtaatgcatttgtgcaggcgttaaaaacgcaatggactgacgatacacttcaagaatgtgtcaactttattggtcagcaattgccgaatggttcacttttgatgtttttaattcaacatcaaaaccatcatcgaggacaaatgactgtccttatgagacaagcaggtttacctgttccgggtatttatggtccggcaaaagaggaatggacaacatttggtttggaagctccgaaataggatgttgttgtaagggctcgaacgaatagatgataccaatcaatgttggtatcttttttgtattagtcttcgtgacatgcagacgaatcaacagttcaaaaggtgtaaagtgagttcaataactgcagaaaggcgattatgatgataactaaaatgactcaattcaatatgaaagacttcaataaaccaaacgaacctttcgttgtttcagggagaatcatcccttcatttgaaaacaatgtttggacatatacagaggagaaatttgctgaaccttatgtcaaaaaatatgacgatgaagacattgatgtcagttatgctgaagaagaggataaagttgtctttttttattacgcagagaacgactgtgtcggccggagtaagcttcgttctaattggaatggatacgcactgattgaagacattgccgttgcaaaagattatagaaaaaatggtgtcgggacggctttattacataaagcgattgagtgggcaaaggagaatcatttatgcggtcttatgcttgaaacacaagatattaatgtttcagcttgtcatttttatgccaaaaataactttgtcataggagcggtcgatacaatgctttattccaatttttcaacagcaaatgaaattgcggttttttggtactgtaaattttaaatataacagtatttgatgtttcgtcatttagcgggtgtgtgccgcaaagtattcaaaacatcggcttgaggatttataataaggtatatcaatcaatgcagggggagttatgtatgaagtgcaaaaaaatgaacagggtacaattaaaagagggaagcgtatcaatggccctataaactgcgtctgccctcattaatggagggaaatttgtgaatacgccttattcacagtcagctttacggcacaaccaagtgttcatttggctttgtgttttgtcatttttcagcgtattaaatgaaatggttttgaacgtctcgttacctgatatcgccaacgattttcataaactgccagcgagtgcaaactgggtgaacacggcttttatgttaacattttccatcggaactgctctgtatgggaagttatcagatcagctgggcatcaaaaaactgctcctatttggaattatggtaaatggcttcggatcgatcattggatttgtcggacactctttctttcctgtactcattctggcccgatttattcaaggggctggtgcagccgcattcccggctcttgtgatggttgcagtagtacgctatattccgaaagaaaacaggggtaaagcatttggtctgatcgggtcgctggtggcaatgggggaaggtgtcggaccagctatcggcggaatgatcgctcattatattcactggtcatatttgctgcttattccgacagcaacagttatcaccgttccattcctgatgaaactgctggaaaaggaagaaagaatcagcgggcgctttgatatgacggggattatattaatgtctgcaggcaccgtattttttctgctgtttacaacgtcatatagaatgtcttttctgatcatcagtattctggctttcctgatatttgtgaaacatattaggaaaactcaagatccctttgttgaccctgcactggggaaaaatgttttgtttatgacgggcgtccttagcggaggcctgatattcggcactgctgcaggatttgtgtctatggttccttatatgatgaaagatgttcaccatttaagtactgcggcaattggaagcgggattatgttccccgggacgatgagcgtcatcatcttcggttacattggaggattgcttgttgatcggaaaggttctttgtgtgtgctgaccattgggattgtattgatgtcttccagctttttaatcgctgcctttttcatagatgcggcaccttggcttatgaccgtcataatcgtttttgtgtttggggggctctccttcacaaaaacggttatatctacaattgtgtctggcagtttgaaacaaaaggaagccggcgccggaatgagtctgcttaattttacgagctttttatcagagggaacgggtatttcgattgcaggcggtttattatcgatcagcttgctgaatcaaaggctgctgcctgttaacgatgatcattccgcttatttgtacagtaatatgctcattctttttacaggaatcgttgttatgagctggctggtaaccatgaatgtctataaacgttcgcgaagaaatgactaaaaagggaaaaggatcaaacttgataaaagttttgatcctttttttaaggagcttccttattacggaaccttttgccgatcaatgaaaggggcgttaaagtgaattacatttataagaaaaaggaaaagaaaaatggaaaattgtatcatttcaatcagagataaatgggagaatgcacttattgagtctgaacaaaaaaataatcgtaatcaattaccgtaacgagaaaacaaccaagttttcactgccaatcgagacttttgaaaaagtgtatgaggatattaaaataggccggagagaaagttaatcactgtttgaaaatgactatgaagttcgtaagcggtatggttttaaccgcatctggattcccctggcaaagtaaaggtctttagggatttatgtcaaaataatagtaagtaccttatgcaacagggagtttggttgcttcataaggagggggaagtatgaaaaataagattcacatattgggagcctctggtgtcggaacgtcaacattgggtgttgcattatcaaagcatttgccgcatacgcatcttgatactgatgattactattggacagataaattcactaaaaaaagagaaatcgctgaaagaagaaagttacttaaaaaagacttgacaataaatgagaaatggattctttctggcgcagtgtgccgctggggcgatgatctaaaaagttattttgaccttgtcatcttcttatggattccgcaggatatacggcttgagagattaaggcatagggaatttcagcgttatggaaacgaagtgttagccggcggcagtaaatatgaacaatcaaaaacatttttagagtgggcttctttatatgatcattccggaatggaagttagaagcaaagctttacacgaacattggatgtcggatttatcttgtccattgttaaaaattgaaggagattactcagtcaatgaaagagttgatcgtgtcttggattatctgaattctaattaaactaacggatggagataactgcaaaatccaaaagtcaaagacagttccggccattttaacggagctgttttttataccgccttcagtttgtctgttgtgaagtgatttattctcggaaagaagcagcggaattaatagagaactcacttcgggaaaccgtgaaggcaggaatcaaaacgggagacttggcggtcaatcatcaacgtcagactttgcagaagaattgcagaaatgatcggatgttaaggcggaaaataagaagtgagaagcagatcatcaaaacgcaatacacctcaatttatattttcagtaagatcggctctgctcattaaaaaactcaattcgaagattagcggcatcaatattgccgcagatggggttagtgacataaagaggaagggataagaccccttccttaaaacctttaattcctctaatttcattgtcagatatattccttttttgaaatgggtatccaaatttcacttttaaaagatggcgatgttacatccttatgctcgttccacaggatttctgggccttcaatttgttcataatgtgacgatggaaaccattcggaataaatccgcccccatacttcctgcagtgcatccggaaatgatccggctgcttcgaatacagcccatgttgaggcagggacttcaagctgtgataggtgatttgggcaatgtttcgttgtggctgcgccaatatagtgatcaagctctccgttttcctctgtcctgccttcagaaaagttcgtggatgcactgatgagtcctgcaggcgctgtattagaaagctcttttagttgtttgattgctgcttcatctaaactttcccacatcgatgcaatgtcaggattcacgcctttgaacaaaatagggactctttttttaatgccgacgatgcgaaatgcctctttttcttcaatgcgatagttcatttcatttcctcctttgattgataactggaaggtcattcgcggataagctttaagtgaatggccattatgtttaacttctgatgggtttatgccatgcagattttgaaatgctcgtgcaaaagaatctggtgagtgataaccgtattttattgcaagatcaatcacctttacgcggctgtctttaagttcaaaagctgcaagagtaagacgtctgcggcgaatatattccgataatgaaatacctgtaaggaaggaaaacatccttttaaaatgatattcagagcagaaagcaagccttgctgcttctttgaaatcaatagcgttcgtgaggttttcttcaatatacgttaatgcgctgttcatccttttaagcgaatccatttatttgacctcctttaacaaaagaataacaggagcgaaatgtatctgcccgacatttcgtgcacagttttgcaggataacttatatgtaataaattaagttactcacctgtatttgtacagataaagaaaacacctaataactgcttgggtttcataagatgaaagaaagttatcattgttttatattgaaaagaaaatagaaaaagacggagttttcttgcgggaggggtttactatcaatcaattgaaagctgcatacgcggaggcagttaaaaaattttagttgatgtcgagaacgatgttcatcttcactgcttgttcaattagaggaagtgattcttccttaagggagatcactttttttattcgactaaagcagcagtttagcggaagaaggagaaaaatcagttgacttacttgaatactgaataggtgtaaaaagtggttattcatacggattgaaaaagaagaacacgcagcagactcacttgctcttgtttggggcaagtgttgacaaccctattagctggtttaattaaagaaggggtataaaacctgtatcaatgatgttactagatatctgcgacacaggttttatatttagctaaaatattcttatatattccacattgcatttttttattatgcaatagttcactctatttctgctttcaatttttcgaaccactctaaattaaccaagtgatgtgaacgggaattttcattcatacggcgaaagtaattgattgtgccgggaatttcttgagtgatggacaggtattcatcaaggagctcgattcgagttttagtctgatcgatttgtgattggatcagttccagtaatttatttttgtcgaattcatcggcaaagagtaacgccccataaaattgcaggttcacatattccgatttggtgccgtatttgatcattaatttttcaaattctgcccttcccgaatctgtgactttaaagttacggatttcacgcccgctggttgagggtttctgctgaatctgttcaatcaaacacttttcttcaagttgctgcagattgtaataaaatgaacctttcgtgaagttaacaatgtatttgtaatgacgtttttccattaaggccagaagttcatagccgtgagctccggggttttggatgagcaagccaaggataagtaagggaatcatggtttcatcaccttctccatccgcgcctcaaattccgcgtacgtgattttacccgaagccaaatccatactatgaaggtaaatctgttctgttttagaatagtcacccttcactttcagtgattgctcctctcccgaaatgggtttcaggatatggtgctttttcgagaaagcctcgaaatagcggtaaccgaatttgcgttgtgaagctgcgtctaaatgaatgccatcaggattcgcagtcaaacctgcagcagtaacaaaataacaattctgttgttcattagcaaaacgcagcaattgttcattaacctgtcgaaattcagtcgcgtgctgtccaaaaccggtcttcccaagaaagtcaccaagccctccaataatcaacggtacatcatcaagtttcaactcgtttcttagcgtctcaatgataagagttaatttctcgtaataagtttcatgcagcgaacgataactgtcactctcaccttggtgccaaaggattccgcaaatttgactggaacggagggcgaagcgggcttcggacaaagcatgctgaaaaaggatgccttccggatgccagtcattcaatgaactgccgccttccgcacaagggatcaagccaatttcttcatcgggatgagctttcgaccaagcatctgcaaaagatgccgccaagccaacgccggaaaccggacggtcgtaattaatcggctctgtcatcatctgccactgtccattgcgcagcatttttattttttcattatagatagggtctacttcattcaaaaatccacggcccgccatattcgactgccccaacattaaaaaagactttatcatttaatttttcacttctttacatcaatattttagtctaattagactatagtcaattcagcttgtcttgtaaagttctaataaggttttacttttattagtagtatgtatgaaaagcaaactaacattgaaaatttggtggatgtatttgagaaatagcaagttcttttgctttagatcttgataaacaatgaaaaacaacaaaaatcctgtcatgtaagggttcctatgaggttcaaaatcattaaaaaggttaacgattgtaccaattctattcatttgttatgttttacttttaaatcctgaagttatacttgaagaggaatgtcctaaaatgcagaaaaagccgggatgtcagatccggcttttcgctcactttcctttcttcttccgcttctccttttccgcccggtaaaactcatgaaacatcttcatcaatgcgcgtttttcaatccgcgacacgtaactccttgaaatgccgagctcctttgcgatctcgcgctgcgttttttctttttttagatcaagcccgaagcggccgacgatgacttctttttcgcggtcgtctaaaatatcgatatattttttgaccttttcaagttccatgttgagctgaatggtgtcgatcacatcctcgctttccgacttgaggacatcgatcaggcttatttcattcccttctttatcctggccgatcggatcatgaagggagacgtcttttttcgtttttttcaatgcgcgcagatgcattaaaatctcattttcaatacatcgtgcggcatatgtggcaagcttcgtgccttttccggctgagtagctttcaattcctttgatcagcccgattgtaccgatggagatcagatcttctgcgtcctctcccgtattttcgaattttttcacaatatgggcgactaaacggagattgtgttcgatcagcatgttgcgggcatgttcatcgccttcagccataaggtctaagtattttttctcctcactatttgagagcggttgtggaaaggcattatttttcacgtatgatactaaaaacacgagttctttcacaataaacccgagcgctgcaaaaacacctgtcaccatcctcacctccacaaagttatgtaggcaaaagcctatatgtaactgtatgtggcagtcaggctgtttgtgtctgtacagggaaattaatcaaaggcaggttttatttcttacagcctcttgatttttgctgattgagcctgtatattgttaaaaaaagtaagggtgaaaagaatataacgaaaagcgctgaagagacgagtagacagatatcattcatgacagagagctccgggagctgtgaaggagtatgaatggatgtgttgaaacaaacctcttagcttcgcatcggaatcatgaaaaacgaggatgatgcggcggatactcctgttaccgagtaagttttgtacccggcaagaggccggcaccaaaccgaattgaggtggcatagcgggctgtttcccgtcctcaagactttattgtcttgagggcgttttttatttctaagggagggataagatgaaaaacctgaagtcttggcggtacccgatgcttctgttaaccggaatcgggatagcaaatattggtgaatggatttattttttgtctcttaatcttattgttttaaaagaaacggggtctgcttttgcggtttccatcctttatttaatcaggcctgcggctgttttgatgacaaatgggtgggcgggcagcatcatcgacaggtgtaacaaacggaatatgatgatgtcgcttgatttcatccgggctgcattcattgccgttctgccgctgatgtttactgtaaggtctttgttttccatttattgtatcgtgtttttgattcaaatggccaatgcgatgtttcgtccgtgttccatggcgtatgtgacgatgcttattccggctgaaaggagaaaacgattcaattcactaagggctttgtcggaatcaggggcttttctcctcgggccggctgcggccgggctgctttttatcgccggcacgccgatttttgcgatttgggtgaatgcggcggctttagtgctgtccggtttcatcacgatgatgctgccgagccttgaaaatgagcctcacgtacattctcccagacagaagctttctttggcagtgtgcaaagaagattggaagctcgtctatcgcttcagccgaacggcgcgaaacgtcatgatcatttattttttattcagtctggtcatgaccgttatgccatccgcgcttgattcgcttgaagccgctttttcaaaagaagttcttcagctgactgatgccgattacggttttcttgtcagtgtctcaggggcaggcattattgcgggggcgcttgtcaatgtaatctttaataaaaaaatgccggcttctttattgatgggaatgggctctttattcacagcggccggatatatgatttatgcgttttctgacgttttttggacggctgctttcggatttttccttctcgctttttttctggcgtttgccaatacaggctttctgacgttttatcaaaagaatgttccggtggacatcatggggagagtggggagcttttattcattagtcgaagccgtcttcattatattggtaacggcggttttcggagcggcggctgtcggttcttccgtccgcgtcatcgtcatcgcaggggctgctgttatgctggcgttggcagccgttttatgctcgttcttatttgcggcctcaaaaaggaggactcccgatgtgtttcaagcggatcaatttaaagaaacataaagagacggccgtttcatttcgtgaggatgagtatctcaggtggctgtcatcccaaatctaatgctcacccgacaattttaagctgcttcttcataacgggcagccgatcggacagcttgaagcttccatcaacttttaccgcagccaaaaaatcggttatgtgcacctttactgagcagcaaagagaacgcggaacgaagctgcatcaatttagaattaaacggaaaagttctcagaatgagaggagccgtaccgccggaataggaggcggtacgcgcttcattttttcgttgtttttaaaagaccgggaaacttcttataaatgaccgccattaagacgagcatatacattccgtaaatcccgaaagacagcagtttgttgcttgtaaatgaagcgcctgcgacggtcacgatcacaatgttcggaattttgccgagcaccgacgcagaaaaaaagatcggccatcgtatgttactcagcccgcagacggtattcatggcaagcgacggtataatcggaatcagccgcccgaaaagcaccgccgtaaacgcgtgctgatgaaatgaaccttcatattgagccgcggccgggtaagccaccagtttttttctggcccagtctctgaatccgtaccggacgagaaaaaacaatgccattgttccgagcattgcgcctgacaatgtaatccacactccgtttacaatcccgaaaaccgctccgtttaaggccgcgataatggcgaatggaacgatcggaaaaaatacgtcagctgcgaccagaaggatactcataagcacggcatacatgccgcccgcgcgaatcatgctgagccagacgtctttttgcataaagccgatcatcacgacagcaatgatgacggcaagactgaatcccttttttatcatctgtacgttcacctcttttcaattagtatacagcacaaatctatctccttctattaaaataagctgtccgataagcgtacttgtttatcagcatttgccgtttgatgagaaacggctggcagccgggtttggacaaaaacatgcgggaagcgggtgatgtgcatcatttgatgcagagaatgattttatacaaaaggggacacgttaacagtagtgtttactggaggtgtaaacgttgagatgctttcatctgatcatcatgatatgcgtcctcacgggtctcactgccgtgtccgccgatgcgaaatctttaaaaagaagtgacatggagaagacgggaaacgtgtactgggatataaggtctgaaaaaaagaagctatctttaaccttcgatgacggcccccatcctgtctatacggaggctgtgttagacgtgctgaaacagcacaatgttaaagcaacctttttttgtatcgggagccgtatagacaaataccccgtaacggcaaaacgcatcgttgaagaagggcatgaaatcggcaaccatacgatgaaccatgtttattttcaccgtttaaaacgcaaagacattttacaagagcttcacagctccgcgcatcatatcagatcgctgcagccggaaggggacaagttattccgcccgccgggagggtcgctgaatcatacggctttcaaaagcctcttaaaagagggctatcatatcatcatgtggtcatggaaccaagatccgagggactggaaaaggcccggaaaaggaaaaatcgtcaggcacgttgtttcacatgccagagatggagatatcgttcttctgcatgacggcggaggaaaccggcgccagacggttgaggctttgaaagaaatcattccccagctgaaaaagcagggctacacgtttgttaaggtttcggatttgatcggacaggattccggtccttttcatatccagtaaagagagcgccgcgttgaaagccgccaaagagatgtgtaccataggaggtaaggtttggggggagagaaaatgaagtttgctgttctttttattacgataacctgtctgttatcaggatgcgctgcgggcaaagagaaaagtgttgtcgcgttcggcgacagcaatacgcgcggttccaactgggattatcgtgattatccgaaggcgcagcagtgggtaaacattttaaaaacagcggaacgcggccgtcttacggttataaatgcgggaataggcggccagacgactgaggatgcgcgcctgcgctttcaaagcgacgtgctggagcgtaagccccaatatttatttatcatgttcggaacaaatgatgcgggcattttgacgggagatcagccgcgagtatcaaagaaacggtttaaagaaaacctgacttatttcataaacgaaagcagaaatcacggcataaagccgattttaatgacgtgcatcccggttatagaaggaaacggaacgcatcatctctattactattcgagatataaagcctcagcctttaaagaaaaaggcggcgcgagaacatggcataattcctataacggcgttacgaggcaggttgcagctgagttgaaagtgccgctggtggataactggaaacactttatacgcgcggacggcggcaaagatacagaccgggcgctgatccaatccggactgatagatccctccggaaatcatatgacgccaaaaggcgccagaatcttaattgaaggcataaaaaatgggcgggttttggaacgctgacgccgtcagctgcctaaaccgttttgcttctgcttcataggctgtagaaaaaacatcttttggaggcgattgctatgaaccgcggtttccctccgcaatatcctgtatgcccgcctcctcgggtgaatgcggggtactggtacgcattttttgttgtgctgctcgtcgtcattctcgttctgggcggtctgtattggttcaatatatagcagccgtcctcttaaacacctctattttaggggtgttttttgttgaaagtggtagtaatgcgcataaccgaagtgatataatatcagtcatctgagtaaaaaaaggaaattcgcccgggaattttttctgtttaagaagaaacggaaataatgtgtccgagcgatcttcttttgatttcgttttcaattaactcgataaattcacggctcaaattcatttcattggctttgaaataagattctattagtaattcatcagaaagctttctcatgccggggacccaattaatgggagtggcacctccttacaattgtaatcaatcatcagacgcaagcatatgatggaaggttgcgtttcaatcatggtgaggttatctttaatctaccatgaaatacaaataagaacaatcgttctgttatccacactcgtaagtggataacttgttagtatcttgtttataatctggataaatccggatgtaataagagtggataatgtgtgtaattttatccacaactggtgaagaaacccaatttttgtcgaaatttttttaccgagtccgactttgtttttaaatctgacagatttcgacatatagatgatagaaagaaaaggaagggtgcgggttttgttaaaaaagttttttttacctgacgaatttgtgaaaaatatatttcatatcacaccggaaaagctcaaggaacgcaatgtgaaagggattattacagaccttgacaacacgcttgtggagtgggacagaccgagtgcgacacctcgattaatcgagtggtttgaagaaatgaaggagcacggcattaaagtcacgatcgtctccaataataatgaacgaagagtgaaattattctcggagccgcttggcataccgtttatttataaggcaagaaaaccgatggggcgcgcctttaaaagagctgtcagcagcatggagctgaaaaaagaagactgtgtggtcatcggcgatcagctgcttactgatgttctcggcggaaacagaaacgggtatcatacgatcctcgtcgtgcctgtcgcttcctctgacggagtcatgacgcgctttaaccgccggattgaacggagaatattgagttctttgaaacgtaaaggccatattcagtgggaggattaggaatggaaaaggttgtttgcatcggctgcggagtaacgatccagaccgaggataaacaaggtctcggatacgcgccaaaggcatcgctcacgaaggagaatgtcatttgtcagcgctgcttcagactgaaaaattacaatgaaattcaagatgtttcattaacggatgatgactttttaaatatcttgcacacaatcggcgatactgactctctaattgtcaaagtcgttgatatttttgattttaacggaagctggataaatgggctgaaccgctttgtcggcggtaatccgatcattcttgtcggtaataaggccgatatcctgccgaaatccgtaaagcgggaacggctcgtccaatggatgaaacgcgaagcgaaagaatacggcttaaaaccccttgatgtctttttaatcagcgcttcccgcggacaagggatgaaggaagtcattgacgccattgaacattaccgcgaagggcgggatgtgtatgtggtggggtgtaccaatgtcggcaaatccacatttatcaaccggattattaaagaggtctcaggggaagagaatattattaccacctctcaatttccgggcacgacgcttgatgcgattgaaatcccgcttgatgacggatctgcgctttatgatacgccgggaatcattaaccatcaccagatggcgcattacgtggacaagcgtgacttaaaggtgctgacaccgaaaaaagaactgaagccgcgcacttttcagctgaatgaaaaacaaacgctttatttcggcgggcttgcccggtttgactatgtatcaggcgataaaacggcgtttgtctgctatatgccgaatgaattgatgattcacagaacaaagcttgaaaatgctgatgccttatacgaaaagcatgcgggagaactgcttaccccgcccggaaaagatcatttggatgaatttccggagcttacggcccacacgtttacgattaaagaaggaaagacggatatcgttttttccggactcggctgggtcacggtgcagcaagcagataaaaaaataacggcatacgctccgaaaggcgtacacgtatttgtccgccgttcattaatatagagagaaggggagagggagcatgaaacaattgtacggagtaatcggaaatccgatcgggcattcaatgtcacccgatattcataacgcggctttgcaagataagaacatcaacgggcagtattttgcgtttcaggtggaacctcattatctcaaggacgccgttaacggaatcaaggcgcttggcatctgcggagtgaacgtcacagtcccgcataaagtcgcgatcatggagcatctggatgaaatacatgaaagcgcgaaagtactcggggccgtaaataccgtcaaaagagagggagacaggctcatcgggtataatactgacggagatgggttttataaatccttagtcaaagtattggacaaaccgatatcagagctctccatcctcatgattggggcgggaggggcggcaagagcgatttttacgacgatcgtccgcagagagccgaaacaatttgacgtttgcaaccgcacgccggaaaaagcggaaagtctgattgcggctgctccctcttttcagcagaaacgcgcccttactttaaaagaagctgaaaatcagcttgaacaatatgacgtcattattcatacaacatctgtcggcatgtatccgaaaacggatgccgtgccgctctcattggaacgggccaaaacgggcgccatcgtttgtgatatcgtatacaacccgattcaaacggcgttcttaaaagaagctgaaaaaagaggtttaacaacccttgacggtgtcggcatgtttgtggaacaggctgcactgtctttcaagctgtggacggaacaagagcctgacagcggcttaatgagagcaattgttgaaggaaaactaggaggaacacaatgttaacaggaaaacaaaaacggtttttgcgttcaaaagcgcatcatttaacgcctatttttcaagtgggaaaaggcggagtcaacgaaaacatggtgaaacagattgcagaggctttagaagcaagagagctgattaaagtcagcgtgcttcaaaactgcgaagacgataaaaacgatgtcgcagaagcgcttgtgaaaggcagccgctcacaattggtgcagacgatcggaaatacgatcgtattgtataaggaatcaaaggaaaataaacaaatcgagcttccgtaaggtggttgacatgaagaaaatcggaatattcgggggcacatttgaccctccgcacaacggacatcttctgatggctaatgaagtccttcatcaggcggagctcgatgagatttggtttatgcccaataaaatcccgccgcataagcagaatgaagactttacagacagccggcaccgggtggagatgctgaagcttgccatcagctctaattccttctttaagcttgagcttgcggaaatggaccggaaaggcccttcttatacctatgataccgtccgtttactgaaggagcggcacccgaacgacaagcttttctttattatcggggcggatatgattgaatatctgccgaaatggtacaaactggacgaactgctcacgctcattcaatttatcggagtgcggcgcccagggtatcatatcgagaccccgtacccgctgctttttgccgacgttccggaatttgacgtttcgtcaacgatgcttagagaacgtctcaaagcaaaaaagccgacgcaatacttaatgccggataaagtgaggcagtatatagaggagaatgatttatatgaatcgtgaggaagcacttgcctgcgtcaaagaacagctgaccgagcatcgctacatccacacaatcggcgtgacagatacggcggttattctcgcaggccggttcggagcagatccgaaaaaagcggaaatggcggctatttttcatgattatgcgaaattccggccgaaagaagaaatgaagcagatcatcgtgcgggaaaaaatgcctgctgagctcttggattacaatgccgagctgtggcatgcccctgtgggagcgtatttggctgagaaagaagcggggatcactgatcccgaggtcttggatgcaatccgctatcacacgtcagggcgtcccggaatgacccttttagacaaagtcatctacgttgcggattacattgaacccggccgccattttcccggagtggaagaggtgcgccgtctggcggaaacagatctgaacgaagcgctcatacaagcgatgaaaaatacaatgatatttctgatgaaaaaaaaccagccggtctttccggagacgtttgcaacctataactggctggtgtctcaaaaacgacaggaggaatatggaaaatgaatcaagcttccgtattaaaaatcgcggcaaaagcatgcgacgataaacgtgcagaagatattttagcgctggacatggaaggaatctcacttgtagcggattactttttaatctgccacgggaattctgataaacaggttcaggccattgcgcgcgaaattaaagatcaggcagaagaaaacggcattgatgtcaaaaagatggaagggtttgatgaggcccgctgggttttagttgatctcggcgacgtcattgtccacgttttccataaagatgaaagaagctactataatcttgaaaagctatggggcgacgcgccgctcgcagagcttgaactcggcttgaactcatgatttaccaaggcttcgccggtgtatatgacgagttaatgtcccatgcgccgtatgatgaatgggcgggctggatcgaagcgtctcttccggaaaagggaagggtgcttgatcttgcctgcggaaccggagaaatatccatcaggcttgctgaaaaaggctgcgaagtcacggggattgatttgagtgaagatatgctgagctgtgcccagcagaaaaaaacaggaaagccgattctttttctccagcaggatatgagagagctttccggttttgaagaacagtttgatgccgtagtcatctgctgtgattccctaaattacttaaaaacgaaaaatgatgtcttaagcaccttcaaaagtgtttttcaagttttgaaggagggcggcctgcttctgtttgacgtccattccccgtataaaatgacggagctttttccggacagcacccatgcggatcaggatgagcagatcagctatatctggcaaagctttgccggcgatgaagagctttctgtcatccatgatatgtcctttttcgtatggaacggacaatcttatgaccgctatgacgagacgcatgagcaaaaaacattttacattgaagaatataaacaaatgcttgcagagaccggatttgaattgaagaaagtgacggctgattttacagaccggcctccttcaacagagtctgaacgtcttttctttacggcaggcaaaccaaaaaccatcgtttaaacggaacgatggtttttaaaatgcattttttgcgattggcgtgataaagctctttatggcatactcagttacacgtgaaattgcttcttcactaacgatatatcttcatcgtatttgtcatgtgtacgctgaaagacacgattgaacatatcctgaacaccgctttcgagagccttcagtccttctccggtgacgccgccttttacgcatactttttcctgcaaggcgggaagcgtgtaatgccccgtttcaagaagctttccgagaccgacaagcatttctgtcgacataatcacggcttcttctttggtgatgtccgtttcttccactgccgcgtcaataaagcgctgaacgagataactcataaaagcgggcccgcagctgacaatgtctgacgccgctcttgtaataccgctgctgatttccacaggttttgaaatatgagtgaacagcgtttgaatatccgcttttgcagactcgctgcagcttttgccgaacgtaacaagcgagacgccggccaaggcgcggttcgtaatgctcggaatgacgcgggccgtctgacacggaaccgtatgttcaatctgatccgtctgaacggggctggtaatggagattaaaatgtgatctttccgtaaatgcggtgtgagttttttcagcaaaggatatatatccagcggttttacacaaatgaatatgatttcattatcctgtacgagcttttcctgatcctcggtgacgtggatgccgctgaaacgttcttttagttttaatgctttttcgattgttctgtttgtgatggtgatatgtgagggatcggcagcgtttgattcgataaacgattcaatcaggatcgttcccatgtttccggtgccgataaagcctattttcaatgaattcccctcctttttcccttaatcctctaaaccttatgcggggaggcaatgcaatatgacgaaagcgatgatgacggagcggatgcggcggaacctgaaaattctgggcgcttgtcttgcggcaggtgcggtttttatctgtatttggctgtttcgttctgaaaaggaagagccggtcaaacagcagtccgtgctcggtcaaacagcctccgcatccgtcgcggacaaaaaagacaccgcagacgataagattatgattgatgtgaaaggagcggtccgaaatcccggcgtgtatgaaatgaaagcgggagacagagtgacgcaagccattgaaaaagccggcggcctgaagaaaaaggcggatgaattgaatgttaatttagcagagcagctgcaggacgggacgattgtttatattccgagtgaaggcgaagaggagaatcgcccgaaaacagcagttggtgaaaaggagaatgcagctgtcaatatcaatacggcatctctggacgaacttcaggcgatttccggggtggggcagaaaaaagcggaagctattatcgcctaccgagaagaaaacggacggtttcagactgctgaagatttgatgaatgtatcaggctttggagaaaagtcatttgagcggataaaaacttccattacggtaaagtgaattgacggttctgcttaaatctatgtaaacttagaaaagcaacaagactttttggagggaacacttgtggaacgaatctcatggaatcaatattttatggcgcaaagccatttgctggcgctgagaagcacatgtccgagactgtcagtcggggcaaccgtagtcagagataagcggatgattgctggcggatacaacggctcaatcgccggcggcgtccattgcgctgatgaaggatgccttttaatagataatcattgccagaggaccatacatgcagagatgaatgcgattctgcaatgttctaagttcggtgttccgacggagggcgcggaaatttatgtgacgcattatccttgtattcaatgctgcaaatcaattatccaggcaggcatcaaaacggtctattatgccgaagattacaaaacacagccttatgcaaaagagctgttcagccaagccggagtcaaggtggagcaggtcgaacttgatgaaatgatcatcgatctgaaaaaccgcgaaaaattgtcttttgtcgcaggtctgattcagcaattatctgatgcgggagttaaggcagatgaactgaaaaaaattcatgaacaggccaatgagctgtttaccagttacgtataaatgaaatataaataccttcttctgcctctggcggcggtttctgcaactgcggggattgccgccgctcatgtcttctgggttctgctcctttttcttctgtatcttctctttattatgataaaaacaaagcagcctgctccggttatcatctgcctcgtttctttttgtgtttatttctttctttatacggtttgtgacgctgtgaatgtaacgcggtatcaggccggcagttatactgaacaggccgtcatcactaatattccgaaggttgacggagcgaaaatgtcagccgttatccgtacacatgacaaggaaaaatgggcggcttcgtacaaaatccggtctcttgaagaaaagagacgcattgaacagcttgaaccggggatgcgctgcacatttacaggctctctggaacagcctgcacatgcgacgattcccgggggttttgattataaggaatatctttactctcagcagattcactggttatttaccgtgacttccattcagcagtgtgaaaaatccaaacagccgctgtttaaactgctgagcatcagaaaaaatttgatttcgatcattcggaatcacgtgcctgaatcttccgccggaattgttgaagcgctgaccttaggtgaaagattttctatagaagacgatatactgagtgcatatcaaaatttgggagtcgttcatttaatggcgatttccggaatgcatgtcggtcttataacggcgggattattttatgctctgatcagaatcgggctgacaagagaaaaggcggggatattgctgctgctgtttttaccggtgtatacgctgctgagcggtgccgccccatccgtattgcgcgcatccctcatgctgggattttatatcgccggaactcttgttaaacgcggcattcattcctctgctgcattgtctctgtcttatctgctgctcctgctgtttaatccttacctcctttggcaggcgggcttccagctttcctttgcggtaagcgcctctttaattctgtcatcctccattttaaagaaagcagggaaaagcagacttgccgggcttgcgatggcttcattcattgcagagctcagctcacttccgtttcttctctatcattttcagcaaatttcacttgccagttttccgatgaatatggtgatggtgccattttatacgttatttgtcattccggtttctgtcatcggtttccttcttcttttactttcaaggcagatgggagaatgtttgtttaatatgtttgaccttgtgatgaagcctgtgcatgatttcattacatatgcggcatccgttgatttatttactatgattgtgttaaagcctgactttctttcccttcttctgcttgcggtttccgtttttacgctttttgcggctttagaaaagggaggttttttaaaactcaggaaatcggctctttttttctgcgcggttttggcttatttaatatgccgtccgtatttcagcccatggggagaagcggatatgcttgatatcgggcagggagactcgctgtttataaacgcgccgcaccgcaaagggaccgtaatggttgatacagggggagtgattgcttatcccggagaatcatggaaagaaaaacgccacccgtattctatcggcgagaaggttttgattccgtttttaaacggaaaaggggtgaaaaagctggatgcgctgattttaacccatgcggatcaggatcacatcggggaagccggagtgttaatcaaaaatcatagagtcaaacggttaattgtccccgtgggattcgtaaaagaaccgaaggatcagaacatattaaatatggcgaaagaaaacaacattcccgttgccgaagcaaagcggggcgacaccattacagccggtgatcttcagtttcaggtgctgtctccggagtcgtctgacggaaagagtaaaaatgattcgtcactggtgctttggacggttttaggcggagtgagctggcttttgacgggagatttagaatcggacggcgaaacagaagtgctgaaaacgtatccgaaactgaaggctgatatattgaaggcgggtcatcacggcagcaaaagctcaacgagtgaagcctttttgaaacagcttcagccggaagcagcgctgatttcagcaggaaaagagaatcgataccatcatccgcacgaagaagtgctggatcgtttgaaggcgtactctgtcaatgtgcttcgcaccgatatcagcggaacgattcaatacagatttgaaaaaggcgccggaacgttttccgtcttccctccatatgatatagaagaaaccagggcgcaagaagtaaaaaagactgccgattgacagcagcccggaatgcggctaagagccgataagatggatggctgttgccatcacgaacaaaaaggcgaaaaatccgaaggacacgacaaaaccgacagctgagtcaacagcatcatttcgtttgctttgaacgtttttttcaaaatcattcaatttcatccctcctgacttccctaagtatactggaattgttttgaaaaatctagaagtgatggtaacgttttctgttcttgtgattatcgcctttttacaagcagacccgggagcttgtgaatcaggcgtttattataaatgaggaagctgtcctttttaaagcttcctctttactatttgccgaactcaatttaggatagaaggggatcaagaaagagaggaagtcatacgatcatggtatttgatgtttggaaagccctgaaaaaaggggatgtccgctccgtttattgcttatacggaaaagaaacgtatctgctccaagagactgtcagccggatcagacaagctgtcgttgatgaggagactaaagattttaacctgtctgtttttgatcttgaagaggatccgcttgaccaggccataaccgatgcggaaacgtttccgtttatgggagagaagcggctggttatcgtaaaaaatccgtcttttttaacaggggaaaaaaagaaagaaaaaatagagcataatacaagcgctttggagacttacctgaaggagcctgcgccttatacggtctttgtgattgtggctccgtatgaaaagctggacgaacggaaaaagctgacgaaagcgctgaagcaaaaagcccttatgattgaagctaaggagctgaatgcaaaggagacgactgattttacgattaatctggcgaaatccgaaaataaaacgatggatacagaagctgccgagcatttggttctgcttgcaaacggccatctgtcttccatatatcaggaaatacaaaaactctccgcctacaccggtgacagacatgagatcacgcttgaagatgtccgggagcttgtcgcaagaagtttggagcagaatatttttgagctgatcaacaaaatcgtgaaccgaaaacggacggaaagtcttcaaatattttatgatcttttaaaacaaaacgaagaaccgatcaaaattatggcgctgatcgccaaccaattccgtctgattatgcagacaaagtattttgcgggacaaggatacggccaaaagcaaatcgcttccaacttaaaggtgcaccccttccgggtaaagctggcgatggatcaggcgaggctattttctgaagaagagctgcggcgtattatagaaaggctcgcagtaatggattatgaaatgaaaacggggaaaaaggacaagcagctcttgctggagctctttctccttgagcttctccggactgaatgaaaaaaacgatccccgttaaagggatcgtttttgtattatgcagaaagtccgttcacttgtttcgcaagtctagatttgtatcgagctgcggcatttttgtgtacaagacctgttttcactgctttatcaatgcgtttcgctgcttcagaaagagcagttttcgctttatccgcttcgttgttagcaacagaagcttcaacttgtttgattgcagtacgcatagcagatttgattgtcgcgttatgagcgcggcgttcgttgtttgtttttgtacgtttaatcgctgatttaatgtttggcatgtgtttcacctcctaagatacaacctgtagcacagtgtcttaaggttaaatcttcttcacaatagaacaaattgtattctatcaaacagaactttagattgcaatataaatgtaaagtatttttcgttgatgggtaaattcgcatgattcgttttgtaaatggccacactatgtaccacgatgattgaaggaggtctttcctgtgaaaaacaacgaactggatgtcaatcaatttctgatacggacggatttagcggtagaaacgaaacaggcggtaaaagacggacaagccggtcagacaaaagaaataaacgggtttattgaaaaagaacgcgacaagggcggcattaaagtcagaaccgtcgatattaccaaagaaggcgccgagctatcggggaaaaagcagggacgctatgtcacgatcgaggctcaaggggttcgggaacacgactctgacatgcaggaaaaagtaacggaagtgtttgccgaggaattttccgcctatctgtcggcattaaagattccaaaggatgcaagctgtttgatcgtcggtctcggcaactggaatgtgacgccggatgcgctcggccctctcgtgaccgaaaaccttcttgtgacaaggcatctgttcaggcttcagccggaaaacgtgcaggaagggtacaggccggtcagcgcgcttgctcccggtgtgatgggattaacgggaattgaaacgagcgatattattcaaggtgtgatcaaagaatcaaagccggattttgtgattgcggtagatgctcttgcggcaagagccgttgaaagggtgaacacgaccatccaattttctgatacgggcattcacccgggatcaggcgtcggcaataaaagaaaagaattaagcaaggaaacgctcggcatccccgtcatcgcaatcggggtaccgactgtcgttgatgcggttacgatcgcgagcgatacggtggattatatattaaagcatttcggcagagagatgaaagatgacagcccgtcaagatctctggtgcccgccggaatgaacttcggcaaaaagaaggtgctgacagacgaagaccttcccggagaaaaagaacgccaatcctttctcggtattgtcggcacactggacgaaaacgaaaaacgccagctgattcacgaagtgctctctccgctcggccataatctgatggtcacaccgaaggagattgacacctttattgatgatatggcgaacgtgcttgcaaacgggttaaacaccgcccttcatgaaaaagtgtcacaagataacaaaggttcttataatcattaaaatggttctacctcctctagcttgttcatagagtaattactagacaagcgctggagggattcaaatcatgagaaaaaaacgcagaaaccgtcaaattgtcgttgcagtaaacggtggaaatgcgctcaagggcatgtttttgtttatgacaagccttatcgttattttcgtattatcgggtgtgctcacatcgcttcgccctgaactgaggctttcttcgaattctcttcacggaattgccggagaacttccgggtgacgcgtttgcacacctcctcggtatggaaaatcattatttcgcctcagagcttcctgaaaaagactcttttcagctgtcccggctttccttaaaactggcgacaagcattaatatggaagacccgcggagtttcttgggacgtgagctgccgggatttgcccaatacgatacggagatccttctggcggggcaggggactgattatacgaatatgcctgctgaatccccgccgccgtcaaaggtgatggaaaaagaaaaagaagtgaacctggcagaaatcgaaaacaaaacgaaaaaagaagaaaaggcgccgccgaaacattcaacaggcagcaaaaaagtcgtttttatttaccacactcataataccgaatcctatcttcctctgttaaaaggggaaacaaatccggataacgcccgccattcgaaggccaatgtcacgcttgtcggagatatgttcggaaaagcgcttgaagcgcaaggtgtaggagcgaccgtagataaaaccgacattcaggcccgcctgaacaaagacggtttaaattatgcgcgaagctacgacgaatcaaggccggtcgtaaaaagcgcgctcgccaaaaataaaaacctgcaatataccatagacattcaccgggattcccgccgcaagaaaaatacgacagccgacatcaaaggaaaaagctatgccagggtcgccatcgtcgtcggcaaaaaaagcgctaattttgaagaaaactataaactcgcaagtgaacttcataagctgatggagaaaaaatacccaggcttaagcgtcggtgttttatcaaaaggctctccgggagataatggagtgtacaaccaggatttaaacgatcggtcgcttctgctggaattcgggggcgtggataacaatcttgaagaactgaggcgcgcatcagatgccgtggccgatgtattcagcgaactgtactgggatgcagacaaggtcagctcgcaatcaggagagaagaaaaaacaatagaaatcaggtgatgcaaatgatccgttttaccggcaaatgcctgctgatcgccattgtcatgtttgtcggcgtattgttcggcatgcagcaggcaaacagcggaatgcttgatatgaaaggatacaaagatccctccttaaaaggagcattcacgctcggcggcggagaaggacaggaaaaagaagcttccattttggggcaaaccgttacggcgaaagatctggaagaaaaacaaaaacagctggaacaggcagaaaccttcaacctgttttcaaaagccggagaaaccctttcaaataccgtgacggactcggcacaggcgatgtatgagtgggtttcgaaactgaaccgttagcattgatgaagagaaaagcggatgattccttaaaggaagcttttctctttcttgttttaattgaatgtttacaatcctattgatataatctaagctagtgtattttgcgtttaatagtaggagtgatagattgtgacagataaagaaaagcgtttagagaggcagtcaagaatccggaatttctccatcatcgcccacatagaccacggcaaatcgaccttggcggatcggattttagaaaaaacatcggcgatcacccagcgggaaatgaaagaacaattgcttgattcaatggaccttgaacgcgaacggggaattaccatcaaattaaattccgttcagctgaaatacaaagcaaaagacggagaagaatatatattccatctcatcgacacgcccggacacgtcgactttacatatgaagtttcgcgaagcctggctgcctgtgaaggcgcgattctcgttgttgatgcggctcagggaatagaagcgcagacattggcgaacgtctatctggcgcttgataatgatcttgagattcttcctgtcattaataaaatcgatcttccgagcgcagagccagaacgtgtgcgtcaagaggttgaggacgttatcggccttgacgcttcagacgccgtcctcgcttcagcgaaagcgggcatcggcatcgaagacattttagaacagatcgtagaaaaagtgccggctcccgcgggagatccggaagctccgctgaaagcgctcatctttgactcgctttatgacgcgtaccgcggagtcgtcgcgtatatcagagtcgtagaaggaacggtcaaaccgggccagaaaattaaaatgatggcaaccggaaaagagtttgaagtcatcgaagtcggcgtcttcacgccgaaagcgcagccggctgacgaattgacagtcggtgacgtaggctatttgacagccgcaatcaaaaacgtcggcgacacccgtgtcggtgatacgatcacgagcgcggttaagcctgcggcagaagcgcttccgggctaccgcaaactcaatccgatggtatactgcggactttatccgattgacacagccaaatataatgatttgcgcgaagctctggaaaaacttgaattgaacgattcatctcttcaatacgaggcagagacgtcacaagccctcggcttcggtttccgctgcggctttttaggaatgcttcacatggaaatcattcaagagcggattgaacgggaatttaaaattgaccttattacgaccgcgccgagcgttatttatgacgtttatatgacggacggcgaaaagatcatcgtggataacccgtcaaacatgcctgacccgcagaaaatagagcgggtggaagaaccttatgtcaaagcgacgatgatggtaccgaacgattacgtcggagcggttatggagctttgtcaggggaaacggggcaactttatcgatatgcagtacttagacgccaaccgagtcagcattgtatatgagatgcctcttgcggaaatcgtatatgaattttttgatcagctgaaatccagcacgaaagggtacgcctctttcgattacgagctgatcggctacaaaccgtccaaactcgtcaaaatggacattatgctgaatgcagaaaaaattgatgcgctgtcgtttatcgtgcaccgcgattacgcatacgagcgcgggaaagtcatcgtcgaaaaattgaaagaattgatcccccgccagcaattcgaagtgcccgtgcaggcagcgatcggacagaaaatcgtggcccgctcaaccattaaggccatgcggaaaaacgtccttgcaaaatgttacggaggagacatctcgcggaaacggaagcttcttgaaaaacaaaaagaaggaaaacgccggatgaagcaggtcggctcggtagaagtgccgcaggaagcgtttatggccgttcttaaaatggatgacagcccgaaaaaataacggaagccgccgcagtcccgcgctgcggcttctttctgtaaagaagaaggtgtttcaaaatgaaatcagcttatattcatattccgttttgtgagcatatctgccactattgcgatttcaataaatattttattcagagccagcctgtcgataagtacttaaactcactcgaaaaggaaatgataaatacaatagaacggacgggacgccctgatctccgcacgattttcatcgggggaggcacgccgacatcgctctcacccgcccagctggaaaaattgatggattccattcaccgcgtgctggagccttctgacggactcgtagaatttgccgcggaagcgaatccggatgatttgtccccggaaaaattaaaaatcatgaaaaatgccggtgtcaatcggctgagcttcggtgttcaaacctttgaaggtgagcttttacaaaaaatcggcagagtgcataaacaaaaggacgtattcacttcctttgaacgtgcgagggctctcggctttgacaacatcagtctcgatttgatgttcggcctgccgggtcagacgctggccgatcttgacaattccgtcaaaacggctttgtctcttgatgcggagcactattccgtttactcgctgatcgtagagccgaaaacggtgttttataatttaatgcaaaaaggccgcctgcatctcccggcgcaagaacaagaggccgagatgtatgaaacggtcatgaggcagatgagtgaagcgggcatccgtcaatatgaaatcagcaactttgcaaagcccggatacgagtcgcagcataatctgacgtattggagcaatgaagcgtatttcggttttggcgcaggcgctcacgggtatatcagcggcacgcgcaccgtcaacgccgggcctgtgaaacattacattcagctcatcgaagaaaagggactgccttaccgtgacacgcacgaggtgacacgggaggagcagattgaagaagaaatgttcctcggtctcagaaaaatgtccggcgtacaaaagcaagcttttctcgataaattcggacgctcggtcgacgaactgtttcccgatgttctcaaagatttaaccgaaaaaggcctgatctgtgacacggaagaatcggttgcattaacgcatgagggcaaattattaggaaatgaggtttttggcgcttttttgggtgagttataattgacatttttcttttggtttgttacttttgatatagaattagcactcgctgaccttgagtgctaacaggggtgatgatgatgttaacaaatcgtcagctgttgatcctgcaagtgattattaatgattttatacaatcagcgcagcctgtaggatcaagaactctttcaaaaaaagacgagattacattcagctctgcaacgatcagaaacgagatggctgacttggaggaattgggctttattgaaaaaacccattcatcctcaggacggattccgtcggaaaaagggtacaggtattatgtcgatcatttgctgtcacccgtcaagctgacaaaaaccgatctggatttaattcactcgatatttaaagaaaaaatcttcgagctggaaaaaacagtccaaaaatcagcgcaaatcctgtccgacctgacaaactacacatcgattgtcctcgggccgacgctgagcgagaactatcttaaacagattcaaatcgttccgatccagccggataaggcggtcgccatcctcgtcacgaacacggggcatgtcgaaaaccgcaccatcaatttcccggctaaagtggatttggccgatattgaaaaactggtcaatatattaaacgatcgattagcgggcgtgccgatggacgaactgaatgagcgcatttttaaagaggttgtcacatatttaaggcagcatatcgccaactatgacagcatacttgaatcgctccgctccacattccatccggcggcccacgttgagaaattgtttttcggcggaaagatcaacatgctgaatcagccggagttccacgatattgaaagggtccgctcgctcttatctttaattgaaaaagagcaggatgttctgaagctgtttcagtcatcaaaagccgggatttcaatcaaaatcgggaaagaaaacgactacgaagaaatggaaaactgcagcttaatcacggccacctatacagttgatacgaagcagatcggatcaatcgcgattatcgggccgacgcgcatgaattattcaagagtcgtcagcctgctgcagcacgtgacttcggacttgtcaaaagcattcacaagtttgtatgatgaataagggaattttggcaatcattttcagtcatctttttacagcatttgagggaggtgaacacaatgtcagaagaaaaacaaaccgcagaacaggttgaagcagcagaacaagaagaagtgacagaacaggcagaacaagcggcttcacaagagcagcatgaagaaacggcaggtcaggaagaagcccttcagcaccaaattgatgaattgcagggtttgcttgatgaaaaagaaaacaagcttttgcgtgttcaagcagactttgaaaactataaacgacgcagccgccttgaaatggaagctgctcagaaataccgttctcaaaacgtcgtaacggaaatccttccggctctcgacaactttgaacgggcgttacaggtagaagctgaaagcgagcagacaaaaagcttgctgcaaggtatggaaatggtccgccgccagctgatggacgcacttgaaaaagaaggtgttgaagccatcgaagctgtcggtcaggaatttgatccgaaccttcaccaagccgtcatgcaggtggaggatgaaaacttcggcagcaatattgttatcgaagaactgcaaaaaggctacaaactgaaggatcgcgtcatccgtccttcaatggtaaaagtgaatcaataactacatagcaggaggtaattcaaagtgagtaaagtaatcggaattgacttgggtacgacaaactcatgtgtggcagtgcttgaaggcggagagcctacagttatcgccaacgctgaaggaaaccgtacgactccgtcagtcgttgcatttaaaaacggcgagcgccaagtaggggaagtggcgaaacgccaatcaatcacaaatcctaacacaatcatgtctgtcaaacgccatatgggtactgactataaagtggaaatcgaaggaaaagactacacgcctcaagaagtgtcagctattatccttcagcatctgaaagcatacgctgaaagctacctcggcgaaacagtttcaaaagccgttatcacggttcctgcatacttcaacgatgcagagcgccaagcgacaaaagatgccggtaaaatcgccggtcttgaagtagagcgtattatcaacgaaccgactgcagcagcgcttgcatacggacttgataaaacggacgaagaccaaacgattcttgtttacgaccttggcggcggtacgtttgacgtatctgttcttgaacttggcgacggcgtgtttgaagtccgttcaactgccggtgacaaccgtcttggcggggacgactttgaccaagtcatcatcgatcatctcgtagcagaattcaaaaaagaaaacggcattgatctttcaaaagacaaaatggcgcttcagcgtttgaaagatgcggctgagaaagcgaaaaaagatctttccggcgtatcatctacacaaatttctttaccgtttatcacagcgggagaagcaggtcctcttcaccttgagctgacactgacccgcgctaaattcgaagagctttccgctcaccttgttgagcgcacaatggctcctgtccgtcaggctcttcaagatgcggatctttctgcgagcgaaatcgacaaagttatccttgtcggcggatcaacacgtattcctgccgtacaggaagcaatcaaaaaagaaacgggtaaagaagcgcataaaggcgtaaaccctgatgaagttgtagcgctgggtgcagcgattcaaggcggcgtcatcacgggagacgtaaaagacgttgttcttcttgacgttacaccgctttctctcggtattgaaacaatgggcggcgtgttcacgaaactgatcgaccgcaacacgacaattccgacgagcaagtctcaagtattctcaactgcagctgacaaccaaacggctgttgacattcacgtgcttcaaggtgagcgcccgatgtctgcggacaacaaaacgctcggccgcttccagcttactgatatcccgcctgcaccgcgcggcgtaccgcaaatcgaagtttctttcgatattgacaaaaacggtatcgtaaacgtaagagcgaaagacttaggcacaggaaaagaacaaaacattacaatcaaatcttcttcaggtctttctgatgatgagatcgaacgcatggtaaaagaagcggaagaaaacgctgacgctgatgcgaagagaaaagaagaaatcgaagtccgcaacgaagctgaccagcttgtgttccaaacggaaaagacattaaaagatctggaaggcaaagtggacgaagagcaagtgaaaaaagcaaacgacgcgaaagacgcgctgaaagccgctatcgagaaaaacgaaattgaagacatcaaagcgaaaaaagatgagcttcaaacaatcgttcaagagctttctatgaagctttatgaagaagcggcaaaagcgcagcaggctgaaggcgcagcaaacgctgaaggcaaaaaagcggacgacaacgttgtcgatgcggaatacgaagaagtaaaagacgacgaaacgaaaaaataagttctttcccgcatggctttaggcggaagaacacacagcatattctgattcaacagacagaaagtcaaagtcaggcatctcttggctttgactttttttcttgcccgggataaaaggaattgaaaaaacataattcaaaatgatacaatctaatttatgtgagaaattcgggagagtgaagcgagatgagtaagcgtgattactatgaagtgcttggggtaagtaagagcgcttcaaaggatgaaatcaaaaaagcctatcggaagctttcaaaaaaatatcatcctgatatcaataaagaatccggagcagatgaaaaattcaaagaggtaaaagaagcgtacgaagcgctctcagacgaccaaaaacgcgctcaatatgaccaattcggccatacagaccctaaccagggattcggcggcggtttcggaggcggcggagacttcggcggcttcggtttcgatgacatattctcaagcatcttcggaggcggcacgagacgccgtgacccgaatgcgccgcggcaaggcgcggatctgcagtatacaatgaccctgtcatttgaagacgcggctttcggaaaagaaacgatcattgaaattccgcgcgaagagaattgcgaaacatgtaaaggatcgggcgcaaagccgggaacaaagccggatacgtgctcgcactgcggaggttcaggccagctgaacgtcgaacagaacacgccgtttggcaaagtggttaaccgaagagtctgccaccactgtgaaggaacaggaaaaatcatcaaaaacaagtgttctgactgcggcggcacgggcaaagtgaaaaaacggaaaaaaatcaatgtcacgattcctgccggtgtggatgacggacagcagctgcgcgttccgggtcaaggtgaacctggcgtaaacggagggcctgcgggagatctgtttgtcgtattccatgtgcgcgcccacgagttctttgaacgcgacggagacgatatttattgcgaaatgccgttaacgtttgcccaagcggcactcggagacgaagtggaagtgccgacgcttcacggaaaagtgaaattgaaaatacctgccggcacacaaaccggcacgaaattcagattaagaggcaaaggcgttcagaacgtccggggctacggacaaggcgaccagcacattgtcgtccgcgtcgtcacaccgacgaatctgacagacaaacaaaaagacatcatccgcgagttcgctgaagtcagcggaaacctgccggatgaacaagaaatgagtttctttgacaaagtaaaacgcgcatttaaaggcgagtaatgattggataggagttggtagttttgaaatggtccgaaatcagcattcacacaacacatgaagcggtcgaacccatctcaaatattttgcatgaagctggtgcgagcggggttgtcatcgaagatccgcttgatttaatgaaagagcgtgagaatgtttacggggaaatctaccagctcgaccccaatgattaccccgatgagggtgtcattgtcaaagcgtatctgccgattaacagtttcctcggcgaaacggtggacggcattaaagagacgataaataatctgcttttgtacgacattgatttaggcagaaacacaatcaccatttctgaagttaatgaagaagaatgggcgacagcttggaaaaagtattatcatccggtgaaaatttctgaaaaattcacgatcgtacccacatgggaaacgtacacacccgtgaataccgatgaactgattatcgaaatggatccgggcatggcattcggaacgggaacgcatccgacaaccgttctgtgcattcaggcgcttgagcgtatcgttcaaaaaggcgaccgtgtcattgatgtcggcaccggttcaggaattttaagcatcgcggccgccatgcttgaggccgaatcggttcatgcgtatgaccttgatccggtcgctgttgaaagcgcgcgtctgaatctaaaattgaacaaagtgagtgatacggccgaagtgaagcagaacaatttgttagacggcatcacgggcgaacatgatgtcattgtcgcaaatattctggcggaagtgattctccgctttacatcacaggcgtatgacctgctcaaagacggaggccattttattacttcaggcattatcggccagaaaaaacaggaagtaaaagaagcgttggaaaaagccggctttaccatcacagaaattctgtctatggaagattgggtcagcatcatcgcgaaaaaataacagttagtaggtgtcacagcgtatgcaacgatattttatcgagctcacgaagcaggagatggacgaaactcccgattttcaaattacgggggaagacgtccaccatatagcgaacgtcatgagaatgagtgcgggagaccggataatctgctgttcgaaagacggccatgaagcgttatgcctgctcaaagcggtttctaaagatcatatatcatgcagcattgctgaatggacgggtgaaaaccgtgaactgccgttaaaaatcaggattgccagcggccttccgaaaggcgataagcttgaatggattatccaaaaagggaccgagctgggggctagtatgttcatcccctttcagggcgccagatccgtcgttaagctagacgacaaaaaggcaaagaaaaagcgggagagatgggcgaaaatcgcgaaggaagcggcggagcaatcgtaccgcaatgaaattcccgaagtgaaaaccgttcatacgttccggcagctgcttgaaatggcggagaatgtcgataaatgtgtcgttgcatacgaggagtcatcaaagcagggagaaacgggcgctttcgccgcggagcttaaaagccttccgcaaggttcgtctcttttaatcgtattcggccctgaaggcggtctgactgagtctgaagttcatcagctttcagaaaaaggcgccgtcttatgcggcctcggaccgagaattttacggactgaaactgcgcctctttacgcgttaagcgcagtttcctatcatacagagttattaagaggtgatcagtaatggcaactgttgcttttcatacccttggctgcaaggtcaatcattatgaaacagaagcaatctggcagctgtttaaagatgcgggttatgaacgaaaagaattcgaacagacagcagatgtatatgtcattaatacatgtacggtaacaaacacgggagataaaaaaagccgtcaagtcatcagacgggcgatccgccaaaatcctgacggcgtcatctgcgtaacagggtgctatgcgcaaacctctccggcagaaattatggccatcccgggtgttgacatcgtcgtcggcacgcaggatcgtgaaaaaatgctcggttacattgagcagtacagggaagagcgtcagccgatcaacggcgtcggcaatattatgaaagcacgcgtgtttgaagagctggatgttcccgcttttactgaccgcacaagagcgtcgttaaaaatccaagagggctgcaacaacttctgtacgttctgcattatcccttgggcgcgcggcctgcttcgttcccgcgatccggaagaagtcattaaacaggcgcagcagctggtggatgccggctataaagaaatcgtcctgacggggattcatacgggcggctacggcgaagatatgaaagattataatttcgccaagcttctccgcgagcttgatacacgtgtagaaggactgaagcggatcagaatttcatctattgaagcaagtcaaatcactgatgaagtgattgaagtgctggatgcgtctgataaaatcgtccgccaccttcatatcccgattcagtcaggatcaaacaccgttctgaaacggatgagacgcaaatatacgatggaatttttcgcggaccgtttaaataagctgaaagaagcgctgccgggtcttgccgtcacatctgatgtcatcgtcggtttcccgggtgaaacggaagaagaatttatggaaacataccggttcattaaagaacataagttttcagagcttcacgtattcccttacagcaaacgcaccggaacacctgcggccagaatggaagaccaggttgacgaaaacgtgaaaaacgaacgggtgcataagctgattgcgctgtctgaccagcttgccaaagaatacgcctccgattatgaaggagaggttctggaaatcattccggaagaggcgtttaaagagtctgatgaggacggcatgttcgtcggctatacggacaattacatgaaagtcgtcttcaaaggcacggaagatgtaatcggcaaacttgtcaaagtcaaaattcaaaaagcgggctatccgtataacgaaggacaattcgtccgcgtcgttgaggatgaaatgacccgaaacatgcgcatgtcttcataacagataaaaaaaccggtgccttcccgcatcggtttttttacggtttcggaggaatcagcctgtcaatcagccggtaaaacaaatgtgtgaacggcagaaacaataaggcggtgactacgttaaataacaggctgaaatgcgcaatcatctgcgcgggatcatcagacaggcgctccgtaatacctgctgatgcagacaggaagggaaagacgagcagcacgccgagaatattaaacactacgtgagcaccggcggtctgtctggcggcataaccgcctgaaacagcagccatgacggccgtgacgcatgtcccgatattagatcccagaacgacgctgaccgcttgttcaatgccgatcaccccttcgttcataaaactcatcaaaatgccgatgcagacggagcttgaatgaatgattgccgtcaatatcatgccgataaaaagagcggaccagctcgaatcattcacatggcgcaaaacctccgcccccgccttcatttctgtcagcggaacggcaagccggctgaagcatgtgatgcaaaaaaagatgatgccgagaccgaggaagcttataccgatctgcctgaacggatatttacggatgaggataaacacaaggcctccgataaaaagcacccaaatgagcacatccatctttatggctaaaaactccgtcgtaaacgtggagccgacattcgtgccgagaatcatcggaatggtccgtttaaaagataaagcgcctgcgctgacaaagccgatgacaatgaccatgaaggctgagctgctctgaagaaaaccggtgaatacgatgcttatgagaaaagctttcaaagggtggtcggtaaataagagcaggcttttctcaatttttgaatacgttaatgcgatcaggccctgcctgagcaggctcattccgagtaaaaaaaccaggataagtgcggtaaagagaatcagtattatcaaacgaaacacccctttccatcattatatagacaagcagccttattcatgacggaaaagtgagctcgcttagttgacctgactgatggcttatattataatgtcaaagtacatgtttatatatgtatctttttaaaggtagtcgattggtgtattcggagggagggaaagagaatgtcaaaaacggtcgttagaaaaaacgaatcgcttgaagatgctcttcgtcgcttcaaacgcagtgtatcaaagacaggtactttgcaagaagcaagaaagcgcgaattttatgaaaaacctagcgtaaagcgcaagaaaaagtcagaagctgctagaaaacgcaaattctaaaagagggtggatttatgagtcttcttgagcgacttaaccaagatatgaagctgtatatgaaaagccgtgagaaagacaaactgactgtcgttcgaatggtgaaagcttcacttcaaaacgaagcaattaagcttaagaaagacagtttgaccgaggatgaggaacttactgtcctatctcgtgaacttaagcaacgtaaagactccctccatgaattttcaaacgctgatcgtttagatttagtagataaagttcaaaaagagctggacattttagaaatttatttaccgaagcagctttctgaagaagagctgcagacaattgtaaatgaaaccatcgctgaagtcggtgcgagctccaaagcggacatgggcaaagtgatgagtgctattatgcctaaagtaaaaggtaaagctgacggcagtgtaattaacagacttgtcagcagtcaattatcttaattgacaagaaaaaagacatctttcctagagagatgtctttttttatacataaaaaaatgaaactaaagtacatttgttacgtatataaagaagaacgaaacgggaaggagggtatatttgccttgttccgaaaaaaaaacggaattgctgttgctctattgggcttatttgtattatctttattaggggttcaattgaacgcgaaagctgatcacccatcggtttatgtcatcccggttgagaaaaatgtcgaacaggggctcgcctcgtttttatcgcgttctttcaaagaagcgaaggagtccggcgcgtcacacattattcttgacatcaatacaccgggaggcgccgttcaatcagccttggatattgcggatatcatcggccgcgcggatgtgcctgttaccgcttacgttaataaacgggcgctttctgccggagcgtatatagcgcttcaggcagatgaaatctatatggcgccgggcggaaaaatgggtgccgcagccatcatcgacggaaaaggaaacgcggcggacaaaaaggctcaatcactgtggcatgcagaaatggaggacgcagcggttaaaaacaaccgaaatccgaaatacgccctggccatggcagatcccgccatcaatgcaaaggaagcgggcgccccaaagggaaaactgctgacactgacagctgaaaaagccaaggaagtcggatattcggagggcacggtttcagaccttgatgctttatatacaaagctcggttttgacaaagcggatgttcaccatgcaaaagaaggttttgtcggcaaattgggcagatggctgacaaatccgtttgttgtccccgtcttattaacgcttgctttgcttggtttgaccattgaattgttctcgccgggcctcggaataccgggtgccgtcggactgacggccatgctgctgtttttcaccgggcatatcgctgccggattcgccggctatgacagcgtattcttattttgcgcgggcttggtttttatccttttagagatatttctgcccggaggcataatcggtcttatcggtattgcaggcgtcatcgcgagcctctttctcgctgcgggcagctttaccgtaatggcggtttctctcttgatcgccattgctgtgtctattacagcctttatcatattaacaagggtgttggggaaacgaatgaaattctttaaaaaattaatattaactgattcaacaagcacggagagcggttatgtttcaaatcagaaccggacggagctgttggggaaagtcggcattaccgctacagccctcagaccgtcaggcaccgtcattattgatgatgaacgtctggatgtcgtctcggaaggatcattcactgaaaaagacagacaggtgaaagtagtgaaagcggaaggctcacgcattgtcgtgagagaaatatagatgataaccttgaggaggaattagatggaactgtcaagtttggcgattttagcaatagttgcagctgccataatcgtgttagccatattcttcacctttgtaccggtgatgctatggatttcggcgcttgcggcaggagtcagaatcagcattttcactttggtcggaatgaggctgcggcgcgtcataccaagccgcgttgtcaatccgttaattaaagcgcacaaagccggcctatccgcaacaacaaatcagctcgaaagccattatctggccggtggtaatgttgacagggtggtcaatgccctgattgcggcacagcgcgccaatattgagctgacatttgaacgctgcgcagccattgacctggccgggcgtgacgtattggaagccgtgcagatgagcgtcaatccgaaggtcattgaaacaccgtttatcgcgggtgtcgccatggacggaattgaagtaaaagcaaaagccagaatcaccgtaagagccaatatcgagcgccttgtcggaggagcgggagaagagacggttgtcgcccgtgtcggagaagggattgtctcgacaatcggttcctcgggtaatcataaaaaagtgcttgaaaaccctgatatgatttcgcagaccgtacttggcaaagggctggattcaggcaccgcctttgaaattctttcgattgacatcgccgacgttgatatcggcaaaaacatcggagcgattcttcaaacggatcaagcagaagcagacaaaaacattgcgcaggccaaagccgaagagcgccgcgccatggcggtcgcccaagagcaggaaatgcgcgctcgcgtagaagaaatgcgtgcaaaagtcgtggaagcagaagccgaagtgccgcttgcgatggcagaagcgctgcgtgaaggaaacatcggcgtcatggactatatgaacataaaaaatatcgacgcggatacggacatgagggattctatcggcaagctgacgaatgaccagcaagatgaagaccaacaataacctctctattaaggagggagccgctatatgcacgagattctgacaaatccgctcgtcattgccgccgtcatcggcattatatcggcaatattcggcaagaaaaacaaagatgaaaaacggccgccgggtacacgccccgaaaatcagacaaaaaagcaggatcaaaaacagccgcagaaagagcataagccggaagcggaagaattgcctgccgtttcagaagagaacccttttgagcaaaaaagaagggaagctgaaaagcgcctagcggagacggagcagatgtttaacgggcttgaacataagctgacatctcaacgcgcacgaaacgcgtctctgaagaaatcagccctcaaaataaataaagaaactgcggttcaaggcattatattcagtgaggttttgggtccgccccgtgcaaaaaaaccgcaccggaccatgcggagcatcggtaaaaaataaagtgttagaaccccttttcaaatcatacatatgagatgaaagggggttctttttttatggggcaaagaaagaatcgtgtaaaggcatggctgacaagagcattggaaattcccccggacgttatgatggatctgcctcggattacgatggtcggcagacttcatatctacatagagaatcacagaggcctcctgctgttcagcgaagaagaagtcaggctgatgctcaagcaggggcaatgtatcatatcaggaaaaaacttggtcattaaggcaatccttcctgaagaaattcttttggaaggcacgatagatcacgtacgatatgtcgattcataaagccggggggaaataatgtgaaaaacaaatggctgtcatttttttcgggtaaagtccaaatggaagtcaaaggaaaagggattgaacggttgctgaatgaatgcacgagaaacggaatcgccatctttgcggtgaaaaaaaagcaagactgtgttctgctgatgattcagcttcaagatgtacatgctttcagaagagtcatcagaaaacatgaatgcaaagcaagctttacaaaaagaaagggtcttccctttctgcttctcaaatcaaaattaaacctgggcttcactgcgggatttgtgatgtttttcgttatattgtttcttttgtccaacatgatttgggacattgatattaaaggggccaagcccgaaaccgagcatcagatggtaaagcaccttgaagaaatcggtgtgaaaaaaggacgtttgcaatttttaatgatgacgccggagaaaattcaaaaatcattaacaaacggcattgataatattacgtgggtcggtgtggaattgaacgggacagcccttcatatgaaagtggtcgaaaaaaacgaaccgacaaaagaaaagtacgtgagcccccgccatatcgttgccaaaaagaaggcggtcatcaaaaggatgttcgtgcaaaaggggcagccgatggcttttgtgaacgatcatgttgacaaaggacagcttctcgtctcaggactgatcggaaatgaagatcggaaagtcgcctcaaaagcggaaatttacggagaaacatggtacaagtcagaagtaaccgtgcctcttgaaacatcatttacgctatatacgggtaaagtaaggacgaagcacaagctgtctttcggatcatggggcgtgcctttttggggctttgaatttaatgaggagccgctgaaacatccgaaaacagaggaagaaaagcacccgtttcaatttctggggatgaagcttccgatttcttacgttcaagaacagacaagagaaagtgaaacaaccgtgcggacttatacgaaaggcgaagcggttcaggccggtatcaaaatgggaagacaagatgtagaaaagcgattaaacggcagcggagaggtggaaagtgaaaaagttttgcaccaatccgttgagaatggtaaagtaaagttgattattctctaccaagttatagaagatatcgttcaaaccacacctattgttcagggagactaaagaatggcagaacatttacttgcgattaatcacaaactgaaaagcccggacgaagcactttctttgttcggcagccaagatgcctttttacatttaatggagaaggatctgggcattagcctcatcacgcgcggtgaaaccatttacgtttccgggaatgatgaaacatttgagatcgctgacagattattgggctcgctccttactttaattcgcaaggggatcgagatttcggaacgtgatgtgctgtatgccgtgaaaatggcaaaaaaagatgaactggactattttgaaagcatgtatgaagaggaaataacgaaaacggcaaaaggcaaaccgatccgtgtcaaaaccctcggccaaagagaatatgtggcggcgatgaagaaaaacgacatggtgttcggcatcgggccggcgggaaccggcaaaacttatttggcggtcgtaaaagcggtgcatgctttaaaaaacggccacattaaaaaaatcattttaacaagacccgctgtggaagccggcgagagcctcggctttctgcccggagatttaaaggaaaaagtagatccttatctgcgcccgctgtatgacgcgctccatgatgtgctcggaagcgaccatacggagcgtcttatggaaagaggggttattgaaatcgccccgcttgcctatatgagagggcggacgcttgacgacgcgtatgtgattcttgatgaagcccagaataccactcccgctcaaatgaaaatgtttttgacgagattgggttttggctctaaaatgatcattacgggcgacgtaagccaaattgacctgccgaaaggcgtcacatcgggacttgcagtagcgaaggatatgctgaaggacataaacggcatctccgtgattgaacttgaccagacagatgtggtcaggcatccgcttgttgcaaaaattattgaagcttatgataagcaaaagtaatgcaaaaatgacccgatctcccgttatcgggtcatttttatatgatgtgttcctgatgtttcagggaggaggttcttgttttgaaaaagaaggaaaagggcaaaagcgcccgggaacggttccgcagtttcagacatgcccgctcagcccatgtgctgctgtacctgctgctttcagcgatcatgtttggtttgctctttattcatgtaaaacctgaatcacttaatttggatttgttttcagtcagtgataagacgatttacgcgcccgccacagtggaagatcagcaggcgacggaatcgaaaaaacaggcggccgaagatgcggtggaagatcaatacaccctgaaaaaaggctataccgacaaccggcttgacctgatcacttccatttttgacagcatcggcgaagtgaaaaaagatgcggaaaaagacaaaaagtcaccttcggaaaaatcattggtcaaatcggtgaaaaacaagctgacacaggatgtcaatgaatccgtctcggaagatgccattaaatcgcttctccatgcaaacaatgaagatttctcatttgtgagggattccgtcattaccgcggtgaatacggtgatgagcagtgaaattccttctgaaaagcttgccgaagcgaaggataaggtcgcaaaagagctgaaaagcgcttctgtgccgtcaaaatatttagcggctgcgactgaaatcggaaaatacgcggtcattccgaattacgtatttgatccgaaagcgacggatgaaaaacgccaggaagcgtcagacagcgtccagccggtacagatcaaacagggacaggttctcgtggaagagaatgacctgatcgaccgggaagtatacaggaagcttgaactgacggggcttttgaataattccaacctgttaaagccgatcagcggtctgcttctgatgatcgggctgtttatcgccacgcttgtctactattttgagaaacagcagcaggagcttaagctgaaaaataaatctcttttgctgttttctatcattacaacgcttattctcgtcattatggaagtcgtcagtctctttcagaagattgaatacaccaatatcggctatcttgtgccgatcgccgccggcgcgattttaatcaggctgctgctcaatgaaaggctcgccattttgggaagcatcattctggcgatctgcggcagtatgatgtttaatcagggtgtgacgggaacatttaattacgtcatcggcatttactatttaatcagcagcatttcaggcattctgtttttggggaaacacaatgcgagatcaaaaatattgcaggcgggactgttcgtctcatttattaatatgattatcgtgctgtcgcttttattaatacaaaatacggcgctgtcacctgttgaaatcggaacgctgatgctgatgggggtcgtctcgggacttgcttcatccgttttgattatcggtctgatgccgttttttgagacgggattcggcattctttcaacgatgaggctgattgaactgtctaatccgaatcatcccctgcttcgaaagattttaacggaaacacccggtacatatcatcacagcgtcatggtggcaaatctgtcggaagcggcttgtgaagccgtaggggcaaacggtcttttagcacgggtcggagcatattatcacgatctcggcaaaacgaaacgtccgcaatattttattgaaaatcagatgaatatggataatccgcatgacaagctgtctcctcagctcagtaaaaatatcattatcgcacatacgacagacggtgcgaatatgctcagaagctataagtttccgaaagagcttgtggatatcgcggagcagcatcacggaacgtcccttttaaaattcttttattataaagcgaaagaaaagggcgaccagattacagagaaagagttccgctacccggggccgaagccgcaatcgaaagaagcggctattatctcagtggccgacagcgttgaagccgccgtccgttccatgcataatcccaatcccgagcggatcgaaaaactggtgcggggaattatatccgataagcttcaggacggacaattctcagaatgtgatctcacgttccgagaactggatacgatcgccaaaacactatgtgcgactttaaaaggaattttccactcccggattgaatatccggaggctacgaagaaggtgaaataaatgggtttactcatagatattgttgatgaaacgaacagcgtctcagctgatgcgctccaagaagtggagaagctgctccaattcgcggcggaaaaagaaggcgttcaggatcaggctgaagtatcggtcacgattgtgacaaatgaagaaatcagagaaatcaacagagactaccggggaaaagacactccgactgacgtcatttcgtttgcgcttgaagaagaaggcgaagacgaggtggaaatcgtaggcgccgacatgccgcctgttttaggagatattatcatcagcgcagacagaacgaaagagcaggcggaagagtacggccattcgtttatgagagagctcggttttctggccgtgcacggctttttgcatttgcttggctatgatcacatgacaaaagaagaagaggaagaaatgttttcaaagcaaaaggatttgctggatgagtatggactcacgagatcataaaaacgagtggagcaggttcctgaagagctttgtccatgcatggaggggaatctggaaaacggcgcggtcagagcggaattttcaatttcatattaccgcggcctgcgccgttatcgtttgcggttttctcaccgggctgagcacagccgaatgggccgttgttttggtgctgatcggagggatgcttgctttggagcttttaaatacggcgatagagcatgttgtggatttagttactgatcagtatcacccgctcgcaaaagcggcaaaggacgcggccgccggagccgtttgcgtctttgccgtgatatcgtgtatcattggtttactcatcttcctgccgaagatatgttagcagaagattcttacaattattttacattgccaaaaatgggcgtgaaaaaccgatcataattatgtaaaataaaagtgacagcggtatcatacaggataaaggtaagagaggaattaagtacacatgaacagacaagaattgattgcagaagcattaaaagcacgggacacagcgtatgtgccgtattcaaatttcagagtgggagccgctcttcttaccaaagacggaaaagtgtacagaggctgcaacattgaaaatgcggcatacagcatgtgcaactgtgctgaacgcacggcgatattcaaagctgtttccgagggggatacggaatttgcgatgctcgccgtggctgcggatactccgggaccggtttcgccgtgcggagcctgcagacaagtaatttccgagctgtgctcaaaggatatgcttgttattctgaccaacttacaaggacaaataaaagaaatgactgcggaagaattattgccgggcgcattttcatcggaggatttacatgacgaacgaaagctttaaatcaggatttgtatctatcatcggaagaccgaacgtaggaaagtctacctttttaaacagggtcatcggtcaaaagatcgccatcatgagcgacaaaccccagacgacaagaaataaagtccaaggggtgctgacaaccggcacgtcgcagactatttttattgatacaccgggcattcacaaaccgaagcacaagcttggcgactttatgatgaaagtggcgcagaatacgctgaaagaagttgacttggtgttatttatgatcaacgccgaagaagggtacggaaagggcgacgagtttatcattgaaaagctcggacagacgtccacgccggtctttctgatcgtaaacaaaattgataagatccaccctgaccagctgcttcttttaattgatgagtaccgtgcgcgctatccgtttaaagaaatcgtgccgatctcagctttggaagggaacaacgtcgaaacccttctcgcgcaggttgaagcgtatttaccggaagggcctcaattctatccgagcgatcaggtgactgaccatcccgagcggttcattatttctgaactgatcagggaaaaggtgctccatctgacaagggaagaagtgccgcacagcatcgctgtcgctatcgagtccattaaagggcaggaaaacggctccgtccatgtcgccgccaccattgtagttgagcgggattctcaaaaaggcatcgtcatcgggaaaaaaggagcgcttctgaaagaagtcggcaaaagagcgcgggctgatattgaagcgctgctgggttcacgcgtttacctcgaattatgggtgaaagtgcagaaggactggcggaataaaatgtctcagctgcgtgatttcggcttcaaagaggatgaatattaattcatctaaagcgcatgcctgatgtgtgggattacctcacagaaacagggcttcgttagcaaaatttgtttaacatgaaaaggaggacatcaggtcaagataagggtaagaatttggattggcaagctagtttaatgatgaaaggtgggttttttgtgttgaattttacctggaacgtattttctcaaacaggaagtgttgatacgtaccttctttttaaagaactggaaaaagagaacctggaaagacccgaagaaccggaagatgagctagcccgaattgattttccaattttgtaaacctcttggcccctcccgttgttggaaggtgcggaaatgctgactaaatgtgaaggaatcgtgctccgtacgaatgactacggggagacgaataaaatcgtgacattgctgacgagggaacacggcaaaatcggcgtcatggcaaggggcgccaggaagtcagccagccggctgtcagcagtcagccagccgtttttgtacgggtcatttttaatgcaaagaacatccggactcggcacgctccagcagggtgaaatgattctcagcatgagaacgatcagagaagatttatttttgacggcgtatgccgcttttatcgctgaactcactgacaaaggaacggaagagaagaaaccgaacccctatttattcgaattgattctcgaatcctttaagaggctgaatgacgggactgacccggacgtgatcacattcatcgtgcagatgaaaatgctcggcgtcatggggctgtatccggagctgaatcattgtgtccactgcaaaagcggggaagggacgtttcatttttcgataagagataacggttttatctgccaccgctgctttgaaaaggatccgtacagagttccgatttcgccgcaaacggcaaggctgctaaggcttttttattactttgatatcggaaggctcggcagcgtctcgttaaaacaggaaaccaaaaacgaaattaaacaggtcattgatctgtattacgaggaatattcaggactttatttaaagtcaaaacggtttttagaccagatggaaagcatgaagaaccttttggatgaaaacaaaagttgacattctgcccatctttttatatgatcatttattataaaatatgttgcagtgacagaaagaagtacttgcgtccaactcatacaagcgaccttaggacagtgtaagctaaggatgagcgcgcaacgaaaggcattctcgagcaaccctttaaaaagaggctgagtgattcacatcctcagcaactagggtggaaccgcgggagaactctcgtccctatgtttgcggccggcaagcatagagacgggagttttttggttgccgccgcacttgtaaaagaatggagaaagtggaggtgcttgaaatgaacattcaagatatgattttaaccttgcagaagcactggtcgaatgaaggctgtgtgctcatgcagtcgtatgatgtggagaaaggcgcaggcacaatgagcccgtatacatttttacgaagcatcgggccggagccgtggagagtggcttacgttgagccgtccagacggcctgcggacggacggtacggtgaaaacccgaacaggctctatcagcatcaccaattccaagtcattattaagccgtcgcctgataacattcaagagctttaccttgattcattgcgtgcgctcggcattgacccgcttgaacatgatatccgtttcgtagaagacaactgggaaaacccgtctttaggctgtgcaggtctcggctgggaagtatggcttgacgggatggaaattactcagtttacatatttccagcaggtgggcggaattgaatgtaagccggtgtccgttgagatcacatatggtattgaacgtctcgcgtcatatattcaggataaagaaaacgtctttgatcttgaatggacgtcaggatttactgtgaaagatttatttatgatggctgaatatgagcattccgtttatacttttgaaacatctgacgtggatatgcttttccatttgttcagcacctatgaaaaagaagcgatcagacaaatggataacgggcttgtgcatccggcctatgattatgtgctgaaatgctctcacacatttaatctgcttgatgcaaaaggcgcgatctcggtgacagagcggacgggttatatcggccgtgtccgcaacttagcgagaaaagtggcaaaaacgtattatgaagaacgggaaaaattagggttcccaatgcttaaagaggagggctcttcccatgagtaaacaagacttgcttttagagatcggactcgaggaaatgccggcgcggtttttacatgacagcatggtgcagctcggtgaaaagctgaccggctggcttgctgaaaaaaatatcgcccacggcgaagtgaaactttttaatacgccgagacgtctggcagtatatataaaagacgtagcagaaaaacaggctgatattcaggaagaagcaaaaggccctgcgaaaaaaatcgctctggatgctgacggaaactggacaaaagccgctatcggattttcaaaaggccaaggcgccggagtggatgacctgtatataaaagatgtaaacggcacggaatatgtcttcgttcaaaaattccaggcgggacaagagacgaagacacttttaccgcaactggaaaatttgattgccggaatgcattttccgaaaaacatgcgctggggcacgcaggatctgcgctatatccgtccgatcaaatggattgccgccctctttggaaaagacgtcattccgtttgaaatcacaaatgtcaagacgggccggaacacgcagggacaccgctttctcggccaagaagtatctgttgatgcgccgtcatcatacgaaaagctgctgaaagaacaaagcgtcattgctgacccgaaagaacgcaaacaaatgatccaaagccagctggatgcgcttgcggccaagaagaaatggaacattccggtcgatgaggatctgctgaacgaagtcaaccatctggtggaatatccgacggcgctttacggatcttttgaatccgagtttctttctatccctgaagaagtgcttgtgacaacaatgaaagagcatcagcgctacttcccggtaaaagatgaaaacgggaatttgcttcctcattttattacggtgcgaaacgggaacagccatgcaattgaaaatgttgcccgcggaaacgagaaagtgctgagagcaaggctttcagatgctgcgttcttctacaaagaagaccaaaagctgaacattgatgaaaacgtgaagaaattggaaaatatcgttttccatgaagagctcggctcccttggagataaagtaagaagagcggtcaccattgcgggcaaacttgccgtccgcctgaaagcggatgaacagacgcaaaaacttgtgaagcgcgccgcagagatttctaaatttgacctggttacacatatgatctatgagttccctgagcttcaaggcgtgatgggagaaaaatatgcgcgcatgctcggtgaagatgatgccgtcgctgccgctgtcaatgagcactatatgccgagagcggccgggggagaagtgccttcaacctttatcggcgcggtcgtggcgttagctgataaactggacacgattgcttccttcttcagcattgacgtaattccgacaggttctcaggatccgtacggattgcgccgtcaggcaagcggcattgtttccattctgatcgaccgcaactggggcatttcttttaaagaactgctgtcgttgacagaaacggaaaaagagaatgagctccttgatttctttacacagcgtctgaaatacgtattaaacgctgaagacatccgtcatgacgttattgatgccgttctggacagcacagagcttgagccgtatgcagccgttcataaggcaagagtgcttgagaagcacctcggcacacccggctttaaagaaacggctgaatcactcggccgggttatctccatcagtaaaaaaggcgagagccgcgatatcaagccggatctgtttgaaaatgaacaggagaaaaagctgtttgacgcttatgaaaaaacaaaagacagtgtcgcggaaagctttgcctccaaaaactatgaacaggcgcttgccgtgctcagcggattaaaagagccgatcgaagattactttaatcacacgatggtaaatgcggacgatgaagcattaaaaaccaaccgtttagcgcaaatgaccgctcttgcagatgtgatcaagtcttttgctaatatgaatcatcttattgtaaaataaagaaaaagacggttgctgtgtgatcggcaatcgtcttttccccttttacataaacatcacagaatgaaaacatagataaagaaacccttccataaaggtggtgagtacgatcgaattaaataaacggcaagaacaaattttacagattgtaaaggaaaacggcccgattaccggagagcatatcgcagaacagctcaatttaacgagggccacgctgcggccggacttggccatactcaccatgtcaggcttcttagaggcccgtccgcgggtcggttatttttatacggggaaaacgggaaatcagctgcttgcggataaattgaaaaagctgcaagtgaaagattttcaatcgatccctgttgtcatcaatgaaaatgtctcggtatacgatgccatctgcaccatgtttttagaagatgtcggcacgttatttgtcgtagatcgtgatgctgtcttagtcggtgtgctgtcacgcaaagatttgctgcgggcgagcatcggccagcaggaacttgcctcaataccggttcatattatcatgacaagaatgccgaatatcgccgtctgccggcgtgatgattatgtgatggacatcgccaagtatttaattgaaaaacagatcgatgccctgcccgttattaaagatacggataaaggctttgaggtcatcggccggtttaccaaaacgaatatgactaagatacttgtcagtttatcagaaaatgaaatcatataagcttgaaaactaacggggggataacatggacaatcgcatcatttatgtagtatcagactcagtcggagaaaccgccgaactcgttgtaaaagcctcgctcagccagtttaacggctcagccgatgatacgcatatcagaagaataccttatgtggaagatatcggcaccattaatgaagtcgtgtctctcgccaaagcggacggcggcattatttgttttacgctcgttgttcctgaaatgcgcaaatacctggttgaacaagcggaaaaagcgaatgtgctgtattacgatattatcggtccgctcatcgataaaatggaatcggcttacggtttgaccgccaaatatgaaccgggccgcgtccggcagcttgatgaagattatttcaaaaaggtcgaggcgatcgagtttgccgtcaaatatgacgatggcagggatccaagaggcattttaaaagccgatatcatcctgctcggagtatccagaacgtctaaaaccccattatcacaatatcttgcccataagcgtctgaaagtggccaatgtgccgatcgttcctgaggtcgacccgccggaagaactgttcagcgttgatccgaaaaaatgcatcggcttaaaaatcagccctgataaactgaaccatatacgtaaagaacggttaaaatctctcggcttaaatgacaaagccatttacgccaatatcaacagaattaaagaagagctggagtattttgagaaaatcgtggaccggatcggctgccaagtcgttgacgtttcgaataaagcagtcgaagaaacagcgaacatcattcatcatctcaaaacaaagggccgataactcaggacgctttatcctgggtttttgggtatgcaaatagggaataaacaaaaaggatggcatcttcgcgaagtttgtattataataaaaaattgtgataaaatgtttatttttaggtttaagcttcgtgtgatacgaataaactattatgggtaagatgtcaagaataactcccggaaatttttcgacaaagctcaaaatagatccgcagtcatggagcatatgcgatttcgcttgtttttatgcaggagattgatggagggatggagaattagtcttctaaatgaaaaagaaaagacgatttttgtcgatgcagacgcatgccccgtaaaagaggaaataatgctcattgcatcgcaattcagcgttcgggttattttcgtcgcatcatttgaacactaccagctttccagaagcaaagacgagaactgggtatacgttgatcctcataaagaagcggcagatttatatatcgcaaaccatgtgagatcgggagacgtcgtagtcacgcaggatatcggtttagcatctcttttgctgaacagaaatattgccgtcttatcggaaaggggccgttcttatactgaagacacgattgacttcgctctgatgagccgtcatatgtcaggcaaaatgagaagaagcggcattcattccaaaggacctaaaaaattaaataaagaagatcggaatcgatttgttaccctgcttaaaaaaatcctgtcgaatgatgaagggatttcaaatcaaaacatcgaataatgtacgacggagtgttataagatgggaaaccgcataccagatgaagtagttaatcaggtgcagcagtcagcagacattgttgaagtcataggtgattatgtccaattgaaaaagcaaggccgcaactactttgggctctgtccgtttcacggggaaaacacgccctcgttttccgtctccagcgataagcagatctttcattgcttcggatgcggagcgggcgggaacgttttctctttcttacggcagatggaaggctattcatttacggaagctgtttctcaccttgcggataaatatcagattgatttccctgatgatataacgattcactctgcatccaggcctgaatcttccggagagcagaagatggaggaagcccacgagcttctgaagaaattttaccatcatttgctaataaatacaaaggaaggccaggaagcgttagattaccttttatcaaggggttttacgaaagagctcatagatgagtttgaaatcggctacgcgctggattcctgggatttcatgacgaaattcttgaaaaagcgcggttttgaggaagaaatgatggaaaaagcgggtctgctgatcagaagagaagacggcagcgggtattttgaccgtttcagaaacagaattatgtttcccattcatgatcaccacggagccgtggcggctttttcaggaagggcgctcggaagccagcagccgaagtatatgaacagcccggaaacgccgctgtttcataaatctaagctgctgtataactttcataaggcgcgcctgccgatcaggaaagaggagagagccgttctgtttgaaggcttcgctgacgtcatatccgccgtcagctcaggcgtaaaagaaagtatcgccacaatggggacgtcgctcaccgaagagcatgtgaaaatcctcagaagaaatgttcaggaggtcattctctgctacgattcggataaagccgggtacgaagctacgctgaaagcggccggcctgctccagaaagccgattgtaaggtaagagtaagcatgctgcctgacgggcttgatcctgatgattatatcagaacccggggcggagaaaaattccggaccgatatcattgatgcaagcgttacggtcatggcttttaaaatgcaatatttccgcaaagggaaaaacttatctgacgaaggagaccggctcgcttatatgaaagaagtgctgaaagaaatcagcgctctttccgggtcgcttgagcaggaaatgtatgtgaagcagctcgcctcagaattttctctttcggtagaatctttgacggaacagctttccatctacgccagacaaaacgcccccggcgacaaaaacgccgaaccgcagacaagacgggcccgggtgacgactaaagcgaaacggcgccgtctccgtcccgcctatgagaacgcggaaagacttctgctcgctcatatgctgagagaccgaaacgtcatcaagaaagtgattgagcgtgtcggctttgaatttaacattgacggacatcgtgcgctggcagcatacctgtacgctgtttatgaagagggtgctgacatgacgccgcagcatcttatggcgagaatgcaggatgaggaaatcagccagctgctttcagatatagggatgctccaagtaaacgaggagctctcagaggccgagttatccgattacgtaaaaaaagtgttggatcaccgaaaatggtcaatgataaaggaaaaagaagcagaaagagcggatgcggagaggcagaaagacttcgtgaaagctgcgtctctggctcaagaaattgttgcattgaaccgatcattaaagtaacaacaaatagaggcttgcgttctgattggcaatgattccttgcggaggagcaaatagatcgcttaacctcatcatgaattgtcattattatccgcagccctgcatgctgaaaaagagagaaggcttccgggtcggataagaaacataccgcttttagaattcgttgcaagctttggaaggagggatccataatggctgataaacaaacccacgaaacagaaacagaacttacattagaccaggtaaaagagcagcttactgaaactggaaaaaaacgtggcgttttaacatatgaagaaattgctgaacgcatgtccagctttgaaattgaatcagaccaaatggatgagtattatgaatttttaggagaacaaggtgttgaattaattagtgaaaatgaagaaacggaagatcctaatattcaacagcttgccaaagccgaagaagaatttgaccttaatgacctcagcgtaccgcctggcgtaaagatcaatgatccagtccgcatgtaccttaaggaaatcggacgggtaaatcttctttctgctaaagaagaaatcacctacgctcaaaaaattgaagagggtgacgaggaatctaaacgcagactggctgaagcaaaccttcgtttagttgtcagcattgctaaacggtatgtcggccgcggcatgcttttcttagacttgatccaagaaggaaacatgggtctcatgaaagccgtcgagaagtttgactaccgtaaaggatataaattcagtacgtatgcgacttggtggatcagacaggcgattacacgcgccatcgctgaccaggcgagaacaatccgtatcccggttcacatggtggaaaccattaataaattaatccgggtgcagcgtcagcttcttcaggatcttggcagagagccgacaccggaagagattgctgaagacatggatcttacgcctgaaaaagtccgtgaaatattaaaaattgctcaagagccagtttctttagaaacaccgatcggtgaagaagacgactcacatctcggtgattttatcgaagaccaggaagcgacatctccgtcggatcatgcggcatatgagcttttaaaagaacagctggaagatgtgctggatacgttgacagatcgtgaagaaaacgtgctgcgtctccgtttcggtctggatgacggacgcacaagaactttggaagaagtcggcaaagtgtttggagtaacgagagagcgtattcgccaaattgaagcaaaagcgcttcgcaaattgagacatccgagcagaagcaagcgtctgaaggattttctcgaatagaatggaacgggtctttttgatccgttcttttttatgtataagatatatggataatatacctttattttactggataagcatatgttttgcaaatgagtttggaaaaaatgcggcatgtcctgaaaggggggaaatgagacaagtttatttatattctttattgtaagcgtatacaattcattatacaatagaataaagataattttgtggtaagcaaaacagttatttttgctttttgtataaattgtgaaatcattgaaattgctgagcaagaccatttactttttgtaaaaataagttagaattagaagtgtttacatagggggagaatgaaaaagggggatggagatatgaagtggaatccgctgattccttttttgctcattgcagtgctgggaatagggctgactttctttttagctgtaaaaggcaatggagatgcgcatcagatcgcaagcggcggtgaaagcaaaaatgccgagaaggaaactgcaaacgcttcacctgaagagatttataaagccaactgcatcacctgtcacggagaaaactatgaaggtgtgtcagggccgaacttaaaaggcgtcggcaaaagaaaagatgtcgctgagattaaaacaaaaattgaaaaaggcggcaacgggatgcccgcgggccttgtgccggccgaaaagctggatgacatggcaaaatgggtttctgacattaaataaagctttaccggtccctatataaaagacatatgaaaaactctatccgccgcttggattccgggcggtttttttatatgatagtaaaggaaaaagaacctgagaaaagttgtgatattgtgaatgaaatgaagttatcgaaaagattgcagtctgtggcggaatatatccctccgggtgccctggttgctgatatcgggtcagaccacgcgtatcttccttgctatgccgttttgaatcatttggcaagccgggcaatcgccggtgaaattacagacggaccgtttctatccgccaaacagcaggtggaaaaactgcacttaagcactcttatctccgtaaggaaaggtgacgggctgagcgtccttgaaaaaggagaagccggcgccattacgatcgctggcatgggcggagcgctgatcgctcatattttggagtcgggaaaaacgaaattgacagggcgtgaacggctgattctgcagccgaatattcatgccgttcatataagagagtggctgtatcaggaaggctatgaactgcttgatgaagtgattctcgaagaagacggaaagtgttatgaaatcctcgttgcggaaactggcgaccgtgatgcgccttatcgggatgtgccgatggctgtcggaatgcttgcgggtccgtttttgttaaaagagaggaatgaagtgtttcttcggaaatggagccaggaacttaagcatactgaacaaatttatgaacagatcagccgcagcgcaaagcatgaaaatcatgaaaaattagctgaattgaaagagcggatttctctgctgaaggaggtaatcggacatgcctaaacatgtgaacggacaggaaatcatccagctgtttgaacaattttcaccgaaggcttatgcggtggaaggagataaaatcggactgcagatcggtacattgaataagccggtgaaaaatgtcatggtgacactggatgttttggaacaaacggtagatgaagccattgagaaaaaagttgacttaattatcgcccaccatccgccgatttttcggccgcttaaacagatcaccactgatcagccgggcggaagactgattgagaaatgtataaagcatgatattgccgtatatgcggctcatacgaatcttgatgtagcggacggcggtgttaacgatctgcttgccgaagctctcggcctgacagacactgaagtgctcgtcccgacatattcggacccgatgaaaaaacttgccgtatatgttccgaaagactatgaagaagctgtaagaaccgcactcggcaacgccggagcgggacatatcggcaattacagccattgcgcgttctcttctgagggaatcgggagctttaagccgctggacggggcagacccgtttatcggacagacgggagagctggaactcgtccatgaagtgagacttgagaccgtttttccggcaagtatggagaaaaccgtcgtaaaagcgctgaaaaaaagccatccgtatgaagaggtggcatatgatatttatccggtggagcagtctccgcttgaaaaaggcctcggccggatcggaaaacttcagcaggacatgacgcttgaagagtttgctctgtttgtgaaagaaaagtttgacgttaacggagtccggatggtcggagagcgaaacagcaaggtgaaaaaggtcgcggttcttggcggcgacggaaataaatatatttatcaggcaaagcggaaaggtgcagatgtttacgtgacgggcgacctttattttcatgtagcgcatgatgcgatgatgatgggattaaacgtcgtggacccggggcattatgctgaaaagatcatgagaaaaggcacggctgagaagcttacggcaatggccggagagaaaaactatgacgtgcgcattttcgcttccgaaacagatacaaacccatttaccttcttataaaaaaactgaggccccgggcctcagttttttatttttactttcggaagaatttttttgagcggcacactgtgttcaagctgccatgtcgattcatcgttgtggtcaaactgctctaaaaagcggatgacttcctttgtaatcggtgtcggtgttgatgcgcctgcggtaacggcgacggtattgacgtctttcagccattcgagcttcagttcactgatgtctccgattcggtaggcttttgttccggcgatttcttctgacacttgagccagcctgttggagttattgcttttcggatcgccgacaacaatggttaagtccgctttttttgcctgctctgatacagcttcttgacgaacctgtgtggccaggcagatttcctgatggtattccacgtgcgggtacttttctttgactgattccataatatcgtggacgtcccactgggacattgtcgtttggtttgtaacgattaatttctcagcctgaatatcgagatttctgacgtcttcttctgtttcaacgagatgaacgatttcaggagcgacgccgacggctccttcaggctcggggtggccttttttgccgatgtatatgacatgatagccttcagcttttacttttcggattaagtcatgtgttttcgtgacgtccgggcatgtggcatcaatcgtaacaagccctttttcctcagcggcttttcttacttccggagataccccgtgagccgtgaaaataacggttcctttttccacctgctttaaaatctccagacggtttgtgccgtcaagcgtgtaaatgccgtcttcctcaaacgcatctgtgacatgcttattatgaacaatcattccgagtatatatataggtcttggcagtgttttatcgagtgacgcgtttttggctatgaccatggcatcaacaacgccgtaacagtagccgcgcggcgatattttgataacgtccaatgtagatgtcctcctatcaaaagtgagtgtagaggcaatataaaaagccgtagttaaacggctcaaatcttgcattcttctgatctcattatagctaatctttcgtgagatatcaaagaatgttaaatatataatttcggctttgatctgcccgatgttctttttggacgcggctgttccgctgagtctgcctgtgcggcgtctttttcttttgaagcggatgctttttcagacgtcttctttgatgtgttggatgaggcgtctgatttgttttcatcttctgtttcatctgttttttcagcttcatcctttttatcctgttcgtttgtttcttttgtctcgtcagattcattctcatcatcgctgctgcttaattggctgtaaagcttcatcatggcgggcagactccgtactaaaggaccgtactgctgaatcatcggtgtaacctgctgcgccacgccgagcaccttctgaacgttgccgagcatgctcgacagggatgccggacttgccaggttctgtattccctgcagtcctgcacctgctcctccgctggccgccgccggtgccgacgcggcagcgcttcctcctcctgaaccgggtaaaaaacgggaaagcatcccttttaagccccctccgccgcccgtgcctgcgtttctcaggcccgctccggcaatctgctgctgagggaaaagctgccggccctgctgcatcagctgccggcccggcaatgacggtcttcctcccatcatcatacgcggattcatcaacggccggccctgctgcgccatatttctcatcggctgctgtggaaacatacttgtacctcctttctgtctctctgctattacaatatgcatcggagggggcatttgcttttctgtctcgaaaacaggattcccccaagacatggtgtttttaagtaaaatcggttataatgtgatgatggacacagaatgtgccgctttaaggagctgggaaaaatgaaagaaactaaatttgatggatacaacttaaaaccgtttattatagatgcagttcaccgccttggtttttatgaaccgacagatattcaaaagcggctgatacccgccgtgctgaaaaacgaaagcgtgatcgggcagtcccagacggggacggggaaaacccacgcctatttattgccaattttgaatcggattgatccgggttctgatacggtgcaggctgttatcacggcgccgacgagagagcttgccaatcagattcatcaggaagcgctcaaaatcacacagggtgcggaagatgagccgatccggacaaaatgtttcatcggagggacggacaagcaaaaatcaattgataagctgaaaacacagcctcatctcgtcgtcggaacgccgggccggatcgcggatctgattaaggcgcaggcattgaacgtctataaagcgcagtctctcgtcattgacgaagcagatctgatgcttgacatgggctttttagaagatgttgattatatcggatcgcggatgccggaagaacttcagatgcttgtgttctcagctacgattccggaaaagctgaagccgtttttgaaaaagtatatggaaaatccgaagtacgcgcatgttgagccgaaaagaatcacagccgaaaagattgaacatgttttggttccttctaaacagcgtgataaagacaagctgctttttgatatgatgtctcatctgaatccttatctgggcattgtgtttgccaatacgaaaaacacggctgaccatattgcgaaatacctgactgaaaagggcatgaggatcggtcttctgcatgggggattaacgccgcgtgagcgtaagaaggtaatgaagcagattaatgatctggaattcacttatgtcattgcgacagaccttgcggcaagaggaattgacattaaaggcgtaagccatgtcatcaactatgagcttccggacgatctggatttttatgttcaccgcgtcgggagaaccgcacgcgccggttcatcaggccaagcactgaccatttatgagctttctgacgaagatgcgctcgtaagactcgaaaagatgggtattgtgtttgactatgcggagcttgtaaacggcgaatggaagaaaggcgatgaccgccaccgccgcaaaaaacgcaaaaaatcggagaatgaggccgaccaaatggcgaagcgcctcgtgaaaaaaccgaaaaaagtgaagccgggctataaaaagaaaatgagctacgaaatggaaaagataaaaagaaagcagagaagaaacaaatctaacaaaggaaagtaggggactcgggttgctgaaaataggttcacacgtctcaatgagcggaaaacatatgctccttgccgcaagcaaggaagctgtttcgtacggggcgaatacatttatgatctatacgggcgctccccaaaacacgcgccgcaaaaaaattgaagacttgaatatcgaagcgggccgcgcccatatgaaggaaaacggcatcgatgagattgtcgtgcatgcgccgtacatcattaacatcggaaatactacaaatccggcaacgtttgagctgggtgttgattttctgcgttctgaaattgaaagaacggcagcaatcggcgcgaaacagatcgtgcttcatccgggagcgcatgtcggagccggggctgagacgggcatcaaaaaaatcattgaaggtttaaacgaagtgattgttcccggtcaaaacgtgcagattgcgctggaaacaatggcgggcaaaggatcagaatgcggaagaagctttgaagagctggccgagatcattgcgggggttacgcataatgaacatctatccgtctgctttgacacttgccacacccatgacgccgggtatgatgtcgccaatgattttgacggtgttcttaacgagtttgataaaatcgtcggcatcgatcggataaaagtccttcatgtgaatgacagtaaaaatattaaaggcgcccggaaagaccgccatgaaaatatcgggttcggagagatcggttttgacgctctgcagtacatcgttcatcacgagcagcttgccgatattccgaaaatcctcgaaacaccgtatgtaggcgaagacaagaaaaataagaagccgccgtaccgttttgaaatcgaaatgctgaaagaaaagcagtttgatcaggagcttcttgaaaaaatatcagctcaataaaaaaggagggggaattgccccctccttttttaccctgagaattggttgaaaagttcgtcaactttccgagctgtttcttttgaggttatcgtttctacttttttcagcaggcgaagccgctcctgttcatcaaaaatattgatgttttttccgtgcatcagagccgctacctcagccgcttgacttctcgtaatgctgattccgtattgcttggaatatttcagaagatcgtccgcagtgacttgattgagccgctgcaaaataattctttgtattaaaatcatcgatactttcacctctttagacataatgtattgagcaaatcattaaaatgttacggcttttaatggtaaaatgaagttgcttactgtttaaaatagttattacaggaaaggagattttatgaccccaaataaacagcataaaagagagtcatttttacactttatcttcagggtcattatgattctgatcggggcgggttcagccgctgtaagtattgaattgtttctggtccctaataattttatcgacggaggcattatcggtgtttcattaattttagaccacctctttatgtccaatcccctcctcaatttcgccttattcgttgtgttactcaacattccatttatgattttcggatataaatatatcggaaaaacatttctcatctctactgttatcggaattgtcggtttagcgctgattgaatcctccttgcaccatgtggaggccattacgacccagcctattttggcgacggtattcggcgggcttttgctcggtttcggggtaggccttgtcatccgaaacggaggctcgatggacggtactgaaatactcggtatccttctcacaaaaaagctgcccttctcagtcggagaattcgttatgctcatcaatgtgtttatttttatttgggccggttttgtgttcggtccggagcaggcgatgtattctttcatgacttattatattgccatgaaaacgattgacgccgtcatccaggggcttgatgaaacaaaagcggtcattattgtggcagatcagtatgcggaaatttcagacgcaatcttgcatcggcttggaaggggaaccaccaagcttcagggaaaaggcggatatacggatgaatccaaagaagtcatttacgcggtcgtgacaaggcttgaagtgactaaattgaaatccattgtgtttgaaattgataaaaacgcctttattacgatcatgaatacccatgaaacgaggggcggtaagttcaaaaccgcgattcactaggctttcatttacttttcatcattttataggtataatttgatacatcataagaaaatggcctgctgttcagacagctgccattttctttttggagcgataccgtgttgtaaaggggaggtcctcatgaacgtacaagaagcgttgaacctgctgaaagaaaaagggtataaatatacgagtaagcgagaagacatgctgcagctttttgctgattctgataaatatctgaccgccaaaaacgtgcttgccgcattaaatgacgactatccgggtctgagttttgataccatataccgaaatctttcgttatatgaagaactcggcattttggaaacgacggagctttccggagaaaaactgttccgttttacatgctcttatacccatcatcatcaccattttatctgtttaacctgcgggaaaacgaaggaaattgagtcctgtccgatggataagctgcacgatgatttggaagggtatgaaatcagcggccataagtttgaaatttacggcacctgtccggcgtgccgataaaaaacctcctgctatatacaggaggtttttttcagcttttaacatgctgaaagctgtgtttgtttttattaatccaggcgacggcttcaagccaattatgcaccctgataatattggaatcgatggggagctgattatatggggagttaaaaaggataaccggaatgcctgcttcttttgcgatcattgtcgcgttgccgtggtgatcttcgaaaaataaatcaatgccgtgttttttgacggcttccactttgtgatggcctccgacaagctcaatgtgatcgtaatgaatgtcccggtttgcaaaccagtccagcgtaacatcttctaagtggccgcgtcttgccgtaatgtagataagacggtgctcttctttcagtccgtccagtgcctgcttggcaaattccgcgagcttcgcttctttatatatggctgcttcatgaacgttcatccattcccaaaattcctcgtctgtaatgttcaaaagcttcgtcagatcataatcagtcatatcatccaaggtaatggaaagatgaaatgagcggtttaaataagggacaaatgtatcctgtgccgtaactgtgccgtcaatatctatacctaaccgtaacatgtccacactcctataaattcatcccttcaagtgtaacataaacaattaacaataccagaaaagtttagcaaacatgaatccgtaaaaaacgcggaaactaaaaaagctcctttcataaaagaaaaagggggaattgaaggtggcatacgattacgaaaatcgaaaaggcaacgactattacgtggatcatggatcggaaggaaccgatatcacgcgtgatgtttattcagaagaaacagcggccgaaatctcagagccatatcgtgcttctgaccgggcagcagaccgtgatgataatcgggacggagtaagtgaaggccgggggatagggtatgcagcattggctatttctatcatttccctgtttgtgctccctgttttattaggggcatgcggcattatcgtcggctatatcgccagaagaagaggagcaggcgctttaggcggatgggcgatgggaatcggtattgtttcccttgtgcttggcatcttcattacaccgtttttttaacacaacgcaaaaaaaaagcttggcggaatatccgtcaagctttttgtgtttcttgttctgcttttgctttttctgcttcaagctttgcatagtgttcttctgccagcttgtcgatttcttttttgagctcttcgaccattgtttcttcagggactttgcggacgatttggcctttgcggaaaagaagtccttcgccgcgtgcgccggcaatcccgatatcagcttctcttgcttcgcccggtccgttaacggcacatccgagaaccgctactttaatcggcgctttgactttagaaatgtattcttccacttcatttgcgatgctgatgagatcaatttcgatccgtccgcatgtcgggcatgaaataagcgtagccgcgtttgaagcaagaccgaatgatttcagcagttctctggctacttttacttcttcaacaggatcggcgctcagagagatccggagcgtgttaccgattcctttgcttaaaatcgctccgagtccggccgcgctttttaccgttccggcaaacagcgtgcccgattctgtaattccgaggtgaagcggataatcaaatgcttttgacgctttttcgtatgcttctatggcgagattgacgtcagacgctttcatactgacgatgatgtcatgaaagtcaaggtcttccaggattttgatatgatgaagcgcactctcaaccattccgtcagcagtcggatagccgtatttttctaaaatgcgcttttccaaagatcccgcgtttacgccgatccggatcggaattcctttttctttcgccgcttttacgacggcttccactttttcgcgacggccgatgtttcccggattgattctgattttgtcggccccgccctcaattgcttttaatgcaagcttgtagtcaaaatgaatatcgacaacgagagggatggaaatttgttttttgatgtcggcaatcgcgttagcggcgcgttcgtccggacatgccacccggacaatttggcagccggcttcggctaaacggttgatttccgcaactgttgcttctacgtcgtgtgttttggtcgtcgtcatactctgaatgacgacttcgttatttccgcctattgttaaaggtcccactttgacgggacgcgtttttgtacgatgtgtgatttcactcacttgtcaatcgctccttaattgtagttaccgcttttgcaggctgagccttttacatgtcaggcaacttctatttacatgttatattgtaacagtgtatttgccgaactgacaagaaattaacgtttaattgcggtagacggggaatttataagcggtgcctgcctgaatggcgtttgcttttacattcggattcagcgcttcaaaatcttgtgcaatatcatctggcgctttatgtgcgccgactatcgacatcaccgtatcgccttttttgaccgtaaccgttctgtatgaagcttcctgttgggctggctgtgccgccgctgcgtatgctggaaggtcttgagaagggatcgtgccgattttaagatcgtaaaagataatgaatatcacaaataaactgccgaatacaaaagtaagccgcttcattccaaccgcctcccgcatacatttttacttcattgtatgcttgtcccattttgttcatgacaaaaaagaagaccgccgggggcagtctttgttatacatctgttttacttcgcggtatctcttttaagacgaggaaaaggatgataaagtttacaaaccaattcactaaaaattcactcggcaccgtaataacaagcgcgcgcatgatcgtaaagaatacggtcgaaagtgtaatggaataagccgaaagcttccagagctgctggtaattcaatgtctttctttgcgcatttttcaatatcaggccgatgacggcgagaaatgatacttcaatgaatttgcctgccgctgtcatgatgaacagcaaaacggacaggacggtgacgatcattgttttattttggtttaatgctgatatgatttctttttttgtgatatcggcaggcatcagcgaataattcatttctgtcgcttgtccgtctacagcaagcaccattttatttttcaaaatgccgatcgcattttgtttcgccgctatttgtttcgcgccgtaagcatctgtgggatcaaagacgatgacgaacccgttcgcttccgtttccttagaggcggacgctttcgtctgcaattctccgtttgaaatgctgaaatcagggaaatctttctttaacacggttttgaaaccgttcattgagtttacggtgccggagcaaaggtaataagcgcttggcagcgtaaaaaggacagacagcaaaaatacataaaggatcgcttttcctatcccctgaaaccgtgtttttgcaatatctgccggagagtatgtacttttcaataaagccgtaaatatgttcaacatcttcacttcctagcctaaactggtatatgttgcttattgtatcgttcacaggggatgaacacaagtgagagtatttaaagcggtgataaggaatcatacataataagataaagcgggaagcggtgatcgcccgcaaaacaaaggagggtgtttttgtcatgagtgttttgtattggctgattatcattgcggtcttcatcattgcttttatcgggcttgtatatccggtgattccaagcgttatttttattgtggccggttttcttctctacggatttttgttttccttcagtccttattcttacctgttttggctcattgaggcggtatttgcggccgttttattcgcagctgattatgtgtcaaatttacttggcgttaaaaggtacggaggaagcagggcggcaatctggggaagcacgatcggattattgatcgggcccttcgttattcccgtggcaggcattatattagggccgtttatcggtgctgtctgcgctgaggtgtttgttcatcaaaaggatatcaagtccgcggcaaaagtggggctcggctcgttaatcggttttttaacaagcgtggcggcaaaaggcgtcattcagctctttatgatcggatatttcttatggacggtgctttagaaaggtttaatttcggcagggaacggataaagtgtaatatgtctgctggaatcgccggattgtgagctttttcattgattaccatgctttcttttgttacattgagattagaaaagttcgcgttaagcggcatttcagtacatatatttaaaggaggaaaaaaattatggcttacaaacttccagaattgccttacgcttatgatgctttagaacctcatatcgataaggaaacgatgacgattcatcatacgaagcaccataacacatacgtgacaaacctcaacaaagcgatcgaaggatcagcgcttgcagagaaatctgtagatgagcttgttgctgatttgaacgcagtgccggaggacatccgcacagctgtccgcaacaatggcggcggacatgccaaccactctttattctggactcttttatctccgaacggcggaggcgaaccgactggtgagcttgctgaagagatcaaaaacacgttcggaagcttcgatcaatttaaagaaaaattcgccgcagcagctgccggccgtttcggttcaggctgggcttggcttgttgtaaacaacggcaaacttgaaattacaagcacgccaaaccaagattcaccgctttcagagggtaaaacacctgtcctcggtcttgatgtttgggagcatgcgtactacctgaactaccaaaaccgccgtcctgattacatttcagctttctggaatgttgtgaactgggatgaagttgcccgtctttacagcgaagcaaaataaatagttcgatcaaacaaggtctcccgcgggaggccttgtttttttattgactttgaatccttttacatatctcagtttgagtgagacaaactaatgtgtagtaaaggggagtcaatgatgagcaaaataaaaaaaattatcggcgacatcgaaataaataaagggctgctgctgttattgacgattggcggcctttactcattgggcatcgcgctgtcaaatacatttgtcaacgtgtatttgtggaagcagtcgggaaaatttattgatttggccatatacaatttgtcggtcgtaacgatgcagccggttacctttctgctggccggccggctggctaaaaaaattgacagggtgtttattctcaggttcggcgttatctttttggccgctttttatttaagtgtgctgcttgctggagaaactgcggcttcccgtctcgttttgataggggccgtgctcggagttggatacggcttttactggctggcttttaatgtgctgacgttcgaaattacggaaccggaaacgagagatttttttaacgggtttttaggcattttgtcttcatcggcgggcatgatcggtccgattgtggccggatatgtcatttcaagacttgaaaacaatacgggttatacaatcattttcagcctgtcgctcggcttatttgcccttgccgtggtcatgagcttttttctgaagcggagggagtcgaaaggccggtttatgctgaaaaaagtttttgatgagcgccacacgaatctgaattggcgccggattaccaacgcgcacttttttcaaggcttgagagaagggatttttgtttttttaatcagcgtttttgtattcattgcgacaaacagtgagctggcgctcggaacattcggtctcgtcaattccgcggtttctttttttgcctattattttgcatcaaggctcatcaaaaaaagagctcggaaaaaggcgattcttatcggcggattgatcttgtacggtgccctgtttcttatcatttttaaaatgagcttcacgacgctccttttgtacggagtgtttattgcgatcggctatccagttctgctcgtgccgtatgtctcgcttacatatgatgtgataggccgggcgcggcttgccagaaaagccagaattgaatacattgtgctcagggagttatttttaaatgcgggcaggatcgtttccatcctttgtttccttgtaatcgttacattattcaaggaaaaagtgggaataccggcggcgctcgtgctgctcggagccggccatccgctgatttattactttataaaagacatcagactggatacggaaacttctgatgaaacagtagaagaagaccgacaaaaacaggcggcggaaccgaattttataaaaggagaaagataaaagggttatctgtagaaaaatatcgaaaaaacctttagaatgaaaaatgacacctgaacagaaggtgtcatttctttctgtaaataagaaaaggtgatgtcatgaggagaaataaaaagaaaatagctgtaaacaaagaaaagaaaaaatcactgccgatccggcttaattttttgtttttggccgcgtttcttattttcacttggattatcgtcgagcttggcatcaagcagatcgttcagggtgatgattataaaaacgccgctaataagcaggaggagtctgatgtcagcacggcggttccgagagggaaaatatacgaccggaacctaaatcccatcgtaacgaataaagcattaaatgcgattacatatacacgttcagcctcaaccacccaggcgcagcgtttaaaaatcgcaaaaaaactgtcgggtatgattaaggtaagcaccaaaaaggtgactgagcgggataaaaaagactattggatgttaacgaggcctgatgaagcgaaaaaactgattacggccgaagaaaagcaaaaagctgaagacaaaaaactgtctgaagatgatttatatcagcttcagctgaaacgtatcacagacaaacagctgaatgagctcacttcaaaagatatgcagatccttgcgatcaaaaggcagatggattcaggctactcactgacgcctcaatacatcaaaaatgaaggggtgtcggcaaaagaaatggccgtcgtcagcgaacatttagatgaactgccgggagttgacgtgacgtctgactgggaacggtcttatccttataaaagcctgatccggacattgctcggcagtgtatccagtgcgaacgaaggtcttccttccaatctgctggatcactatctgtcactcggctacagccggaatgacagggtcggaaaaagctatttagaatatcaatatgaaagcctgctgcagggtcaaaaagagaaagtgcagaacttaaccgactcatccggaaatgtcacgggcagcaaagtgatttcaaaaggacaggccggcaaagaccttgtattatccattgatatggacctgcagaaatccgttgaaaaaatcattgagaaaaatttaagatcggcaaaagcgagaccgagcacgaagcttcttgatcgggccttcgtcgtcatgatgaacccgaaaaacggagaagtgctgacgatggccggcaaacagattacgaatgatcatggaaagtacaaaattaatgattatgccctcggcgcaatgacttcctcctacgcaatgggatcggcggtcaaaggagcgacggtgttgaccggactgcagacgggcgcgattaatttgaacaccgttttccaggatgaacctatgtatttcaagggaagtaaaaacccgaaaaaatcatggaccaatttaggtcccgtagatatccaaaaagcgcttcaggaatcctcaaacgtgttcatgttcaaaacggcgattgctgtcggtaaaggggagtacaaaaaaggccagtcccttccgcttgatatgaaggcattcgatactttcagatactacttcaatcagttcggactcggagttaagactgggattgatcttccgaatgaagcaaccgggtaccaagggacacagcgaatttccggtcttctgttagactttgccatcgggcagtatgatacgtttacaccgctgcaaatggcgcagtatgtatcaacgatcgccaatggaggctatcgtttgaaacctcagcttgtaaaagaggtcagacagcctgattcgaaaaaaggaatcggagccgttgtagagtctgttcagccccaagtactgaacaagattgatatgaatcatgcagacattaaagaagtgcaggcaggtttcagacgtgtcatgacaaaagggacagccgcaactgattttgcgacggcgacatacagtcctgccggtaaaacgggtacggcgcaatctttctatgacggtcctgacaaatcagagacgggtgaaggaacgtataatacgactcttgtcgcgtatgcacctgctgataatccggaagtggctatttctgtagtcgttccttgggcctatattaattacagcgatcgatattcgattacgaatgatataggaagagcagctctggacaaatactttgagctgaaaaagaaacaagaagataataatacgaagcagaaaaacgaagataaaattcaggaagacgctgaaaacggcaatacaagcaactaacagaaaaacgctcacaacctgtgagcgttttttttatacaaaaaaacatccggatttacaaaaccttaacacttgatttatacgcattttacaagaaccctttactctatacgtgtaggacaaattacacattaaatgcagggggaattcaggaaatgaaaaaaaacaaatggatgcttatgcttctgatggctgctgttatgattgttgctgcagcatgcggaaatgcaaaggaaagcggcaagacagacagtcaatctgcaagtgaggataaaaaagcatcaggttctttaaccatttctggttcatcagccatgcagccgttagtactggcagcggcggaaaagtttatggaaaaacatccggatgctgatgtgcaggtgcaagcgggaggttcaggaacaggactttcgcaagtgtctgaaggggcagtgcaaatcggcaactcagatgtcttcgctgaagaaaaagaaggcattgatgcgaaagccctaaaagaccaccgagtagcggtagtggcgatggcggctgcggtcaaccccggtgcgggcgtaaaggatataaccaaaaaacagctgacagacgtctttacaggtaaaattaaaaactggaaagagcttggcggtaaagatcaaaaaattacactcgtgaaccgtcctgattcatctggaacacgcgctacgttcgtcaaatatgctcttgacggagcagagcctgcagagggcattacagaggattcctccaatacagtcaaaaaaatcattgcggaaacgccgggagcaatcggttatctggcattctcttatataaacgatgacaaagtaacgcctttatcgatcggaggcatcaaaccggaagagaaaaacgtcgtcacaggcgagtatccgatttgggcttacgagcactcttatacgaaaggtgaagcgtcaggccttacaaaaacgtttcttgactatatgaacagcgatgaagtacagaaaagtatcgtaaaagatcagggctacattccgatctctgatatgaaagtcacacgtgacgcaaacggcaagcaaagctgaggggagggcgggctccccgcctcttcttctttataggagtgtaaacaaatgataaatcacagagaaaaagagtctgtaagcgaacgcttaataagctcaaaacaaaacaggcaattggatgaagtccgcggaagggtgattgtgtctgtgtgtgccgcgattatcattgcggcatcagcggcgatcacaatttttctcggcataaaggggctgcaatctttttttgtaaatggtgtaagcccgattgagttcttaacaagtctgaattggaatccaacccaggcaaaacctgagttcggcgcgctgccttttattttcggatcatttgcggtcacgattctgtccgctctgatcgcagcgcccctcggtattgcgggtgccgtgtttatgacggaaattgcgccgacttggggaaaaaaggtgctgcagccggtaattgagctgcttgtcggcattccgtccgtcgtttatggattcataggtcttacagtattggttccgtttatcggctcttttaaatcaagcggaacgggtcacagccttctggcggggacgatcgtactctcggtaatgattctgccgactgttacatcgatttccgctgatgcgcttgcgtcacttccgaaacaccttcgcgacggttcatatgcgcttggggcgacgaggtggcagacaatcagaaaggtgcttatcccggcggcgtttccgacattgctgaccgctgtcgtgctcgggatggcaagagcgttcggagaagcactcgccgtacagatggttatcggaaatacaaagcttctgccggaaagcctgcttgatacggcgggaacattaacgacgattatcacgttaaacatgggccataccacatacggcagtattgaaaataatacgttatggtctatggggcttgttcttctcatcatgtcgtttctgtttatattgctcatacgctacttgtcatctaggaggaaagtgtaatgaaccggaaaataacggataaattggccaccggtgtattcgggttatgcgccgctgtaatcgcggcgattttggcaggattgtttttgtacattcttattcacggcgtctctgaaatctccttgcgttttcttacgtcaaaatcgagcgccattgcctcaggcggcggaatacgggatcagctttttaactccttttacattctgtttatcaccatgctgatcacgataccgcttggtgtggggggcggcgtctttatggctgaatatgcgccccaaaataaaatcaccgattttatcagaacgtgtattgaggtgctgtcttcgcttccgtccattgtcatcgggatgttcggcatgctgatgtttgtaaacctgaccggatggggctacacgattatcgggggcgcgctcgcattaacggtctttaaccttcccgttatggtccgggtgacagaaggcgcgctcactgcagtccctaaggagctgaaagaagcttctctcgctttaggcgtatcgagatggcataccgtcaaaacggtgctgattccgagtgcgattccttcaattttaaccggagccattctggcatcaggaagagtattcggagaagcggccgcattgttatttacagcggggctgacaacgccgcggctgaactttacggatttgaacccattttctgaatcatctcctttcaacattttcaggccggctgagacgctggcggttcatatatggagtgtcaatacgcagggaatcatccctgacgccgaagcgattgcaaacggcggctcggcggtgctggtgatttcggttctcttgtttaacctttctgcgagatggctcgggtctgtcatttataaaaagcttacggcaaattaatcggaaagaggcgaaaacatgatcgatcacatcatcagggaacaagcggaacagacaaagcgtttgccggagtcttcgattttggaagtgaagcatttatcaatttattacggtgacaaacaagcggtaaaagatgtaaacatgaatattgaaaaacatgcggtgacggctctgatcggtccgtcaggctgcgggaaatcaacatttttgagacagattaacagaatgaacgatgccattgcttcggcaagaagcgagggagagatcctttatgaagggctgaatattttgggtgaagcgattaatgtcgtgtctctcagacgggaaatcggtatggtgtttcaaaaaccgaatccgttcccgaaatccatttacaataacatcacacatgcgctgaagtatgcgggggaacgcaggaaagccgttttggatgaggcggtcgaggaaagcttaacgaaggcggcgctttgggatgaagtcaaagaccggcttcattcatcggctctgtcgttatcaggcggccagcagcagcgcctttgtatcgcccgtacgctggcgatgaaacctgccgtgcttcttttagatgaaccggcttcagctctggaccctatttcaaacgccagaatcgagacgcttttgacagaactgaaaaaagattattcgattattatcgttacgcataacatgcagcaggcgctgagggtgtctgaccgaacggctttctttttaaacggggaagtggtggaatacgggcagacagaacaaattttcacgagtcctaaagcgcaaaagacagatgactacattaacggaaagttcggatagggggaaggactgtgagtcttgtgaaggaagcggtgcacacacagaatttatttgatattcacggcatgaacgtatggtacggagcccatcaggctttaaaagacattacgatcggttttgaggagcggaaggtaactgcgatcatcggtccgtccggctgcgggaaatccacttttattaaaacattaaacttaatgctgcaaatggccccgaatgtcaaagtgacaggcgacatgatctataacgggcgcaatctgctgaaggaaaagacggatgcggcagaattaagaaaacagatcggtatggtgtttcaaaaaggcaatccgtttccccagtcaatatttgagaatgtcgtgtacggtccgagaattcacggcgaaaaaaataaaaagaaactgcttgaaatcgccgaggaatctttaaaagcagctgcgctctgggatgaagtgaaggatcgccttcaccaacaggcgctttcactgtcaggcggtcagcagcagcggctgtgcatcgcaagagcgctcgccaccaaaccggacgtccttctgatggatgaaccgacgtccgctcttgatcccgtgtccacgcggaaaatagaagagctgattttgacattgaaagaaaagtatacaatcgtcattgtgactcataacatgcagcaggctgcgagggtctctgatcaaaccgcgtttttctatatgggcgaactggtggagtggggcgatacgggcaaaatattttctcagccggatcatcaaaaaacacatgattatatcaccggaaaattcggatgaaaaaaacgggcccggccattaaccgggtccgttttatatgtctattaaaaaagcctgccggccgtatccatctgaatggacgatgcctgcaagcttttttagcgggttaatgttttgacgatttttttaaagctcatatctgaatcgactttgaaatggccggcgcggatttctttgtggtagcctgcgtcaatgacgtaatcattgaagtctttcgctgaaggaataatcccttctttttcaagaatggatgacacatcagcagtgctcattccgtctttaatcgtcagtttgtatgttacttttttctttttggcgtctgtgttttggtcgttgtttaacgatttttctttagaatcaagcagtttttgatagtcatcccggttgacggagactttatgctgatcgtcgaggtagctgtttacttctttttctgtcaatgctgttttttcggttttaacggcggctgcctggtcatggtcagtcaaatagaagacagcggcgagaacggccgtcgctaaaatcatgcctgctgcaaaagcctgaatgccccgttttgtcatacgagcaccttctcattatctttaataatggtattgacgtcctcgacagacacgtgctccgcttttgcgatggcttccgcagacattccgttgttatattttgaaatgatttgtttggcgattttttggtttatgccgctgcttttggctttgcggatcacgaggttggtttccagcaattcttcttcaagcaccgtcattttctttttcaacttgtaaatttcctgcatggcggaaagctgaagcgtttctagctcctgttccacgtctttcatcggatctctttgagaatatgagaatgcaataagcgctatactgacgataaacaacgcaataatagcaatttccacgtttcatcaccttctattattaatttgcccttcttttttataccataaaacgccgccattctaaaggaaatagagaaaaaaacggaattttgtcggaaaatcttttttactcggggagcaaacggttatttctctatagatttcgtatcagaaagcccttttttgtcctgtttcgtcatattttaccttcttctgacgcaagctcattcagaggatcagaagcgtaaactgatgttttctgcacttaaacaacatttcatgtaaatcagctctagcattccgtccattatagtggtattatatataagtctgaataagtaaatgatatttagtttggagggaaaataatgcgcgttaatattactttggcttgcactgaatgtggtgagcgtaactatatttctaaaaagaacaaacgcaacaatccggaccgcgttgaatttaaaaaatattgcccacgtgataaaaaatctacgttacaccgtgaaacaaaataagctgtttaacacagcggaaaaagctggagctttcaataaagttctggcttttttgtctttcagggaggtttgagaaacgtgaaagcacaaatcagaaccgatataaaagcaaagctttctgacatgacagaaagtgaatgggagaaaaaatgccgcagcatgcgtgaaacgctgttttctttaaaagaatggagacaggcccgcgtgatcgccgttaccatctcgacacgcctggaaattccgacacggccgattattgaacaggcctggcaagagaaaaaacaagtctgtatcccaaaatgctttccgcagacgggagcaatggagttccgtacattttctgcgtatgatcagctggaaaccgtatatgcgggcctcagcgaaccgatcgagagtctgacggaaaaagccgcccaaaatgacattgaccttgtgattgtgcccggcgtggcttttgaccgggaaggcttcagaatcggatacggcggaggatattatgatcggtacctgtccggttataaaggccgtaccgtgtcgcttctctttgactgccagctgacagaccgcattccccgcatgccccacgatattccggtcgatatgatcgtgactgaatctgaaaccatcgcttaatcgcataaaaaactttttgcaccggaataattctcgctgtttgacaaacgataggggcaggagggataagatgaaaaaattgttgatctactcattatgcgccgtatctgttttagccgtttaccaaaaccgctaccgtctgatgaacagcgtgctcagccagccggggatcagacggacattcattcatttctttttaaaaataccgtttatcagaaacaaattcattcagcaggcattttaaacaaatcccgttttttaagcgggattttttgcataagaaaacctgccggtaaaaaacggcaggttttctcgtattgtcagctttttttcaggaaaccgagcagaattgagattataggagaaatgtacaggaaaaaggtaaacggcaggtagtcgacgacggaaacccctaatgcgcttgccataaaagcgccgcttactccccagggaatcagcgggttgatcaaagttccgccgtcctcaagcgaccgcgcaaggtgaatccgcttaatgccgagcttgtcatataaaggtttataagattgacccggaattaagatcgacaaatactgctcacctgtcgcaaggtttacgcctatacttgagaagacggtcgccatgacaagacgtcctttcgtatgcacgccttttatcaatccttgaagcagcgccgcgatcaggcccgttttttccatcaggccgccgagcgcaaaggcgatcataatcagagagactgatcccatcatcgattggagcccgcctctgttgataatgctggccacagcctggtcgccggttttaaacgccgtcccgctttgcagggcggatataaatccttgaatgctgctgtcaggaataaaaacagcagtcagaagccctgcggaaataataccggcggtaagcaccggaatcacggaaacccgtctcacagctaaaatgatcactaacagaggtgaaagaagcgaccaaggcgtaacgtgcacggcctcttttattccggaaatgaccgcctcaatattttgcgttgaagcggcatttattgaaacagatgaaccgagaatataaaaaagaacgatcgtgatcagcagtgccggaacggtggtgcccatcatatggcgaatatgcttaaaaatcggaatttcgccgattccggcggcaaaattcgtcgtgtcggacatcggtgacattttatcaccgaaacaagctccgcaaataactgctcccgccgtccattcgagcggaactcccgccgcgcttgctacccctaacagcgcgacgccgattgtactgacagttgtcagacttgagccgacaagcgtgctgataatcatgcaggaaaataatgcggtcaaaagcagctgactcggctgtataattgacaaagcgtaaacggtgacggtgggaatggcgccgctgtacatccaggcgccgatcagcacaccgatcaaagccagcacgataatcggctgcaccccgttttttaatccgctgacaattcctttttcaagactctcccacgagaaaccgagccacaaacctgccagagacagaataatgacgcaaaagaacagcggcatatgcggctctgtatgaaagaaaaacaggcaggaaataatgactgctaacatcaagacaaataaactgatggctgagatgaacgtcagccttttttcttgtttcaaaacaacaccccatcaaactttaatccttttgtgcttttgggcacgaaagtattgtaacagaaaaacgcataaatgagtgtttttttacaattgtgaatatacaatttatgaaaataatacaaggatattttctccaatcgttttttgcttgacgcccggatcagtgatgaaatacgcttatactaagaagaatagaaatggtgaagaagatgaattcattttatgacgtgcagcagctgtttaagtcattcggacatattgtttatttcggtgacagacaagccgaaattgactttatgaaagatgaattaaaggaaatgtacttgtcaaacgtgattgaaagagatttatggcaaaaagccgccggagttcttcagagagaatcggagcggatcagaggcagttaacacagcaggattttaataagaaaaggagattattatggaagatacatggtttgcggggattgatctgggcggaacaaccatcaagctggcctttatcaacatgtacggtgaaattcagcataaatgggaagttccgaccgataaatccggaaacacaattacggtcacgatcgccaaagcgcttgatcagaagctggaagaactgaacaagccgaaacggattgtaaaatggatcggaatgggagcgcccggacctgtggaaatgacgacgggaatggtctatgagacgacaaatatggggtggaaaaactatccgctgaaagaccatctcgaggcggaaacgggtattccggccgtcattgaaaacgatgccaatatcgcggcgctcggagaaatgtggaagggtgcaggtgacggggccaaagatgtcattttagtgacgctcggaaccggagtcggcggaggcatcatcgtcaacggagaaatcgttcacggtaaaaacggggccggcggagaaatcggtcatatttgcagtattccggaaggaggagctccgtgcaattgcggaaaatccggctgcatcgaaacgattgcgtccgcaaccggcatcgtccgcatcgcgaaagaaaagcttgcggcggtttccgactcttcgctcttacaagtgcgcgatctgacggcacgtgacgtgttcgaagcggctaaacagcaggataagaccgcgcttgaagtcgtcgattatgtcgcaaaacatttaggcctcgtgctcggaaatctggcaagcgccatgaatccgacaaaaatcgtgctcggcggaggcgtgtctaaagcgggggaaatcctgcggtcaaaagtggaagagaccttcaaaatcaccgcgttcccgcgttctgcggaagcggccgatatttcgattgcggcacttggaaatgacgccggagtcatcggcggggcgtggattgccaaaaatgaatggctcaaacatcaaaactgctgaagaaagtctgcctgcccatatcgcgggcggctttctttttttatctcccctgtcatatagtttttaaaaaagggggatgaacatggcgggaattcgtgtcaaacctgaattgaaacagcatatgaaagatattgcaaaggtgctttcaattgatgaaaaactgttgaaagccgctgataaaacggcggaaagcgatgaattattttgtcccggctttgccgtgagcgggcagtcagagggtccgccgcttgagacgctgagcgggctttcgcgatacatccggcactgtgaaagcgttctttccgctgatcaatgggtgaaggaagaaaaggtgtacggctccgaatcggtttatgaagaaattgagaaaataacggatgtctttccgtttgtcacatgccgtaaaatcggcagttccgtattgggaaagccgctttatgagctgaaaataggtgcggatacggccgaaagaaaagtccatgtaaacgcctcatttcatgccaatgaatggatcaccacctcggtcgcgcttaaatggtgtaaagaatattccgtggcattatgcgaaaataaaaccgttttcgggcagtctgtgcttgatatattcagccggacatcattgtcattcgttccgctcgtaaatcccgacggtgttgatctcgtactttacggatgtgaagatttatcagaaaaaaaagaattcctcaacgaattaaatgagcaccgcccggatttccgcgaatggaaggcgaatataaacggtgtggatttaaataaacatttcccatccaattgggatattgaacaaaggcgcaaaccgaaagccccttcataccgtgattttccaggaacggcgccgctcactgaaccggaggcgcaggcgatgcaccggctgataacggaacagccacctgaccggctgatcgcgcttcatacgcagggagaagagatttactggggatacgaaggatgtgaaccggagcaatcatcccagatgattcgggagtttgaagcgataagcggaaaccgctatcaaggcgttaaaaccattgacagccatgccggttttagggattggtttatacagcagtatggaaaagagggctataccattgagctcgggaagggaaaaaaccctttgccttttcatcagtttgctgatatttatcaagcgacggaaggtattttgtggaggtcgcttgttttttgagacatctgtgaaatttctcatttgtttacataaacaaatatgggacaatagaaaagaatggagggaaggctgatgagatacttggtttgtgttctgctgtccgcattcgttctgtgtttagcggcctgtgaaccatctcatcagcagcaagacacaggcgtttcggcaaaatcggcagaacagaaaatcgttccgctcagtaaaaaggaagcggaaaaaacggaaggatggctggataacagaacaattctgtatacagcacatcatcagctgatgaaatatgatcttttcagcggaaaatccgaacggctctatgaaacaaagggcaatattgtcaatgtaaagatcagccggaaaaaacagctgattctcgtacaggtgacaagcagcggtcagactgagcttgtgcttatgaacaagcaggggaaaagactttatcacaaagcctttaactcttatgagctggagacggcttggaatccgtatgacccgtatcaaatgatgattaccgtttttactgaaacatgggacttcacagcctatacggccgatatgaacaacggcattttaaaaaagagtcccgttcaggccccttttgtccattggacctccactgatgaattccaatatatcaagcaaggaaaaacggaggaagagggtcctttatattcttatgacttgcagacgaaaaaagaaaaaagagtgcttcatcacgtcatctgggctgattcccgcccgggcatgacgattgccgtcagaccaacggatcaatcggacggagacggcgagttctttttccaaaagccggcatccgtgacacaccgctttcctctccaaaaaaagtatgagagcttcgcgccgatggaatatgattacgatcagacacacaagcggttttacatatttaagcctgaaggccgctcttacaatctgatcagctttgacttaggagacgaacgggagcggacggtgctcaaaaacacggaaatggagccgattcagatctctccgaacggggaatacgctttatacggctttacgtatgaccgtctgatttcactgaaaacgggcatgacagaaccaatcataacaaatgaaaaaggagtttgaaccaaatggcaattgcagatgtcacaatcattccgatcggaacaaaaacaccgagcgtcagtgagtatgtagcggatgtgcaaaaaattttggagggttacaaagctgccggcaaaatcaaatttcagctcacgccgatgaacacgttgattgaaggtgagctgagcgacttattcgcagtcattcaggatattcacgaagccccgttccaaaaagggctgcacagagtggcgacaaatatccgcattgatgacagacgtgataaagaaacgacgctggagagcaaaatcaaaagtgtcagcaaacatttgcagcaataaaaaataagcctgtatccattggatacaggcttttaatgtgcagtcggatagccgctggttacaacggtcattacggtaaaccagccaaacacgcccagcgtggcggcggctaacaaaaatcccaggatatttctctgtctgacagcccgcaggactcctaatacagctaataatgcgacaaggccgaagattacaacaagtaacatcatgctcctcctttgtcattggaacctgaaaatctttccatttcattttaaccgttttcattttgtttgtcgatagcgttttcccggccgcattcattgaatcttccgcagaaaaccttcataataagggcatatacataaagaggtgatgaaagtgaaatggagacgaatgccggccgggccgattcaggcaaacgcgtattttcttgtcagtgaggatcagtcctgtcttatttttgatccgggcggggaagcggacaaaatcaacaattacataaaagaaaacaatctgaagccgctggccatcttactgacgcacgctcattttgaccatatcggcgcacttgacgaagtaagagacagatgggatgttcccgtataccttcacaaaaatgaagaaaagtggctggaggactcttccttaaacggatcaggcatattgcggggcatcgccgtaacggcacggcccgccgaacggctcatcgaaggcgacggcattttggacatcgggcctttccatttggagacattgtttacgccgggacattcaccgggaagcgtttcttattatgtgaaggacgcggatctggtgatttcaggtgatgtgctctttcagggaggcatcggccgaactgatttacacggcggaagtcaggacgtattgcttgattccattcatcaaaaactgctcacgcttcccggacatacacttgtgttaagcgggcacgggccggaaacggacatccagacagagcaggagcgaaacccgtttatcaatggtttttcactgtaaatgaaaaaagacagaccataatcggtctgtctttttctgttcagtgggttccgccgcccggtgtcataataaaaatagagtagtatgtaaatccggcgaaaaatacggttaagtaagctccgaaaatataaatatacatccgctcagtcagattcaaataagaaagaaatacgaaaaagatcgtctgtccaaaaaacaaaagagaagcgtctttcatgccccctagaaaaaacatgactgcaaatatccccgtccaaaatcctaacacccggaacatgcgattcattccttatcccctcccgagagtctatctgaagtttattataatagatcggcactcaaaatgtaaacattttcatgattatatttattgtggaatttatgtctttccctgtgttttatatcttatgccgttctctaaaaaagatccgaaaaatctttttgaaatacgtttagggaaaaaaagttcagggtacttatgttaacaaagagacggattatccgagggaggaatttttaaaaatgaaagaacttattttttattcatacccgagctgcacatcatgccgaaaaacgaaacattggttaaaagcccacaatgttgactttcaagagcgacatctattcagggagacaccgacaattgatgaattgaaacagatcttatcattaacgaccgaaggaattgatgaaatattggcgacgagaagccaaacatttaaaaacctcaacctcaacattgaagaaatgactgtaaatgaagtgctgaagcttttgactgagaagccgaaactgctgcggcgtccgattctgatcgatcgcaataagctcgttatcggatacaatccgggagaactgatgaagctgacgaagaaaaaaacggtacatcaatctgtatcataagagaaaaacgaagatccgctgatcaaatttatcagctaatcttcgttttttgcggttgcgggactgggctagctggattcgaaccaacgatcacggagtcaaagtccattgccttaccgcttggctatagcccatcggatgtaattacagtatgtgcgtccggcgccgatttatacatacaaagtaatttgaatggaggagacccgtgaaacatttgaatgaaacattatctcgaaccttaattgaagaatcaggtgaaatcacacgccagtggctgctcataccaaaatcggggcggccttcagatgatcagaaagcggaaatgcagcaccgtctgttaattgaaatcgttgccggcattttatcggaaaaagaaggcggagaagaggagctgacaaagtgggcgcttcagttcgcaagggaccgggccgtccatgaagtaccggtctatgaaagcgtcacgagctttaaagaattccggagattggtctggaaccgtatacagacatgctgcgaaacgatgtctgagaagcccggggcgaatgcggtattccattggggagagaagctgaacaaagcaattgaccatatgattgaagtatttacagaggaatattataaagtgacggttacacaattaaacgcccaaaaggaaatgattaacgaactgagcgcgccgattatgccgattgccgccggtattggaattttgccgcttgtcggcgaaattgatacctaccgggcaaaaatgattttggaatcggtgcttgaccaatgttcttcactccggctttcttatttatttttagatatatcaggtgtgccgattgtggatacgatggtcgcttatcagattttcaaagtgattgacagcacaaaacttctcggcatagaaacgacaatctcaggcatcaggccggaaatcgcgcagaccgtcgtgaagctcggcatcgatttttctcaggtgaaaacggagcagagtctggcgaaggcgctggcaaaaaacggatttatcgtaaaagaatcattaagatgataaaaagctgaatggccgggagggatttctccctcagctattcagctttgtcagcttcaatcgtcatgatatgatggctgtcgatttcttttaccgtaaatgtgtagccttcaaaatcaatggtgctcccgggcttcgcgtcaatatgctgagtaagaaaccagccccccagtgtatcgacttgatcagccgtaatctctgttccgagtaaatcattgacgtcactgatcagcaatttggcgttcaggagatagcggttcttcccaagcttttgaacggaaggtgtttcgtccgtatcaaattcgtcgcggatttcgccgacgatctcttcaatgatatcttccgccgttactaaccccgcggttccgccgtattcatcaatgagaatggccatatgggcgtgttcccgctgcattttaacgaacaattgataaatcggaatcgtctcaatcacatggatcgccggctgaatgtaagggctgagttcgtgttttgtaaacgccgctccttctgacaggaatctgaataaaacttcttttatattgatgatgccgactacatgatctttatctccttttacgacgggataccgggtatatttatttgttttgataatgtcccggagcatatgtcccgatccgctgtctaacggcaggctcaccatttcattccggggcaccataatttctttggcagtgcgcttatcaaatgtaaaaatgttatttacgtaatgcagctcactttttttgatcatgccgcttcgatagctttcggcaaggagcacccgcaattcctcttccgtataagccatttcatgttcggaagcaggcttcaagccgaacatggctgtaatcaggcgggcggaatgattgagcagccagatgaacggaaacattaacttataaaacaaaatcatcggtctggcagacaaaagtgtaatccgctcggctttttggatagcaaaacttttcggggcgagttcgccgatgacgacattcacatatgtaaccagcagaaaggcgatgatcaatgacagtacttgggcaaccgcttcgtgaactccggtctttaaaaataacggctgaagcattgctttgactgtcggttcacccagccagccgatccccaaagcggtgacggtgatgcccaattggcacgccgataaatattcatcgaggtgtgtaatgacatgcttggctgcttttgctccttttacatcttcctcaatgagctgattaatacgggagcgccttgctttaacgattgaaaactctatggcgacaaaacacgccgttaataatataaatagtacgatggcggatagtttgatgatatacaatgtaacgccttccgcgaaggaaggcttgcacctcccttttttcggaataataccactgtagaaagctgctcaaacatcgaacctggtttagcccgcctcatttacggtaataaaacaagaaagcgatactggaggatgacaagagatgaaggtacattcgggtgcggactggctgtggtaccagctcggtccgcatgaaaaaacggaagcgaaaaaaatgatccatcacaatcactggccgcaatgcgaaaagtggtttgaacatgaaaatcatataaactttctgcgctcagatacaaatgatcagaataatgaagcggttttcggatctttaatctatcatcaaggattagatgatgaaaaaaaccataccgtatttcacttttatattacgagagacttcttttttacgattaattttgatttttcgctgctgcgcggtgtaaaagaaaagcatgccacacagcagattcaaacctgtgaaaatccgattgaaggcttttttgttctgctgggagagctgatgaattcctatctgatcggactggatgaatttgaagtcaagcagcggacgctgaaatggcagattcatgatgacaacagcaaaggaatcttggaaaatgtgcataaactgcgccatgagctgttcatttggaaaggccttacactgggggctaaaaaagtggaaatggctttaaaagaagcgtttcttccgaaaaatgacaggcagaaagattacctcagagctcatcataagatggaaagagggattacatatatcaatgagtttgatcaggaactgagcaatctgctgcacgccgaggaagtcattacctcccaaagaggaaatgaaattgtgaaagccttgacgatttttacaactctctttacaccgatgacggcgcttggagctctctgggggatgaactttgataacatgccggagcttcattggaaatatgcgtatatctgttccatcgtgctcattattgtatcaaccctgctgatttatatttatttgcggcagaaaggctggacaggggacattttgagggagcatcaaaaaaaatatttgcggaaagaaaagaaacgctaagaagagcaggcatacgcctgcttttttgatggctgaaaatggccgaatggttccggatttcattcagtaaatcaatgtcagggggcttattttttatttttttgcgttttacacagtgtaaaacgcataatctctcctttgccggcttttgtgtatctgatttacaatacgtgcggaaggagggaagtcttgtgaaaaatattgaaacatacagcaggaacatcataaacgaggcctatacggcaagggcttcagatatacacattgtgccgagagaaaaggatgctttcattcattttcgcatcggccatgctcttgtgaaaaaaagagtcttaaaaaaagaggaatgcgtaaggcttatttctcatttcaagtttttatcggccatggatataggagaaagacgtaagccgcaaaacggttcattgtctctgccgcttccgacggaaaccgttcatttgagaatgtcaaccttgccgacaatgaatgatgaaagtcttgtcatcaggcttttgcctaagcggcagattccccctctggataaactgtccttatttcggggggcgggcgccgcactattgtcctttctgaagcattcacacggcctgcttctgtttaccggcccgaccggctctggaaaaacgaccactctttactcgcttgtcaactatgcaaaacggcatttcaaccggcggattgtcacgcttgaagaccccgtagaaacaagagatgaggatgtgttgcaagttcaggtgaatgaaaaagccggagtcacatattccgccggtttaaaagcgattttaagacatgatcccgatatgatcatcttaggggaaatcagagatgccgaaacggctgaaatcgcagtccgcgcggccatgacgggacacctcgttctttcaagcctgcatacaagagatgctaagggcgccatatacaggctgctggagtttggggtgaacatgacagaaattgaacaaaccgtcattgccattgccgctcagcgtctggttgatttaacatgtccgttctgcaaagaggaaaactgttccgtgtactgccggatgtacaggcagacccgccgtgcgggcatttatgaactgctctacgggaaaaacctcacccaatgctttcaggaagcaaagggagagcacgccaattttcaatatcagacgctccgcaggctgatcagaaaaggaatcgcgctcggctatgtcacaaccgacaattacgatcggtgggtgtatcatgaagcggattaaacgaacctggccgttgaaggatcaagcggcttttttgaaaaggctcggtgaaatgacggaaaaaggatacagtctgattgaagggctcagactgctgaaactccagctgcataaacgtcagcttgcagagctgacggacggaatccgcaggctgagggaaggtgatgcgttttacgaagtgcttgaggcactgtcttttcataaagaagccgtctctatctgctatttcgcggagaaacacggagaattgccgggggcgatgaaacaaagcggcgatttgttacagagaaagctcatgcagacgaatcaaatcaaaaaaatgctccggtatccgatgtttttaatttcttccgtctgtgtcatgttttatatcctgcaaagtttaattattccgcagttttctgggatttatcaatcaatgaatatgaatacatccggtgcgactgctttcatctttgcattttttcggcattttcatgaagcctgcgcactggcgctgtccgccgctttctgcttgtttttgtacgtttggttcttatgtaagaaaaaatccccgcaagataaaatgctcattgttgtgaaaatacccctcttgggaaaagcggccgttctttttaacagctactttttctctttacagctcagcagtcttctgaaatccggcctttctatctatgacagcttaacagcttttaaagaacaatcttttctgcctttttatcgtgaagaagcagagatgctcattacacgtctgaaagccggagaaaccatagaatccgctctttccgggcatccgtgttatgaaaaagatcttgcggctgcagtcagccacggacaggcaaacggcctgcttcaccgcgaactttatacgtacagccagtttatgatggagcgtcttgaacaaaacgcggcgaagtataccggcattctccagcctgtcatttacggtgttgtggccggtatgattttaattgtctacatgtcaatgctgatgccgatgtaccagatgatgaaccaaatgtaagggagtgcttcgtctgaaaaatcaagatgggtttactttaattgaaatgctgatcgttttatttatcgtttccattctgcttttaatcaccattcctaacgttacaaaacataatcaaagcattcagcataaaggctgtgaaggactgcagaatatggtgaaagcccaagtgacggcgtacgaaatcgaccatgaaggtaaaatgccggatatgaacgatttacaatcagaggggtatatcaaaaagaatacagcctgcccgaatggtaaacagatcttaattagtggcggagaagttacagttgaacaataacaggcggacagaaaacgggtttacccttcttgaaagcctgattgtgttaagcctggcgtccgtcctgctgacggttttgttcacgacggttccgccggtctgcacccaccttgccgtgcggcaaaaaacagaacagcttcaaaaagatattcagcttgcgcaggaaacggctatcgcagaacataaaagaacaaaaatcacttttcttccaagagagcataaatacaaactgcagtcagccggaaggattgtcgagcgttcttttgattcgcttcacattacacttgtgactttaccggagagccttgaatttaacgaaaaaggccatccgaattcgggaggaaagattcgattgaagagcgccgggttcacctatgagatcacagtttacttagggagcggaaatgtccatgctaaacggaaataaagggttctctactattgaaacactatcagcaatggccatttggctgttccttatgacgtctatcattccggtctggacaggcatgctgacagatggtctgaaaatagaagatcgccaggaagcgtatcagcttcttcagaaacatatcagcacttatatgatgaccggaaaaaagccgccgtctcccggtgtgaagtggaagggggatggtgagtattacaaagtgtgtgcggctgaccgcggcgaaaaagaaatgtgcctcagcattctcaaaacagactggctttacgcttcttaatgttttgttctccttggcagtctgtcttttcctatcaggcaccctgggcccgattttacatctgtttttatcaaaccggaccgataacggcggattagacagccgggagcatcaaattgccgttcagcagatcatgaacgaatgtaaacaggctgagactgtgaagccggcggacggcggattggcgttagcatgccggaaaacagggggcgaagaagtgcgttttgaaatttatcataagatgataaggaaaagagtaaacggaaaaggccacgtgccgatcctgcaaaacgcggcatcattaacggctgatgtgaaaaacggcctgctcttattagagatctcaagcgttacaggtaaaaagaatcaggcggtcattccggtttacagctctttaaaaggtgattaaatgtacaaatctgacggttttatctatcccgcggttctgtttgtttctgccgcagttttacttgtcatcagctatacttcatctgatttcatcacccgaaaaacatttgcgaaagaggccggggagtactggatcggagagaatctgctccaaaacggcgcgctgctgtcaagccgccatatgacacagggacaaaaggtccaaactggtacacagcgttttccgtacggaactgtttccttccgcatcaccgggagtaatcgccgggaaacggttcaggttacaattcaggccgaaacagtgtcaggcacgagacgggaggctcaccttttgttcgatcagaagaagaaacagctgattcaatggacggaagtataaaaaagaggcggcgggacaacacttcatagtaaagacagcactatgaggtgagagccgtgaaaacaaatgattatgtaaaatatatgactgagcaattcgttaaatatttcgatacgccgaaacaggaacggagagagcgaaaagaagtgcggaaagaaaagaaagtgccggcttctcagcactggttcggaatattgccgtacagttttaagctgtggatgcagcggaaaaaataaagcgaatcacacataaggtcctcctgtatcaggagggccttattggtattcctcaatgacggcaattttatttaccttttggctgtagggattaaaagaaatcgtaacaaacacaccaaattcttttgcgccatcccgcaatgtcaagtggtattgtttgactgcttcgtccgttcttttccggtcccacaccttttgaataaataacgtttgggcgagcggatatctttttttagcttctttttctgctaacttttcccattttgatttatggtgaacagcataataaggcaccgtttccgcctgagctgttcctgaaaccccgaaaacaagaagagaaaggcaaatcagactttgtgtgatcatcattcttcgtcctttcgctgtatatactttccattttgtgctaggcacctcgttattttctcacgttttattagaaaaaattccaaaaaggtgtgtaatttgaagcaaaacgatgtttttgaaagataccattctcaaaaacgaacaaattgaccgattttgacatttttcaagacgataatccttgattatactttgttcatgaagttctttaaagagaacggttgtcatatttattaacagttttacagggggtaaggcatgttccgattgttgcgaatggaaaaaaagggcaaggtgagatggcggatgatgctatttttacggctttcgttcattttttgcctgtccgtgacgatatgtgctcagttcacaggtgatacaagttcctccttcaatgatgtgaaaagcttcagtctcccggttcaaacgtgcggagattttcaatatacggatgacgattgccgttatgacgaacgctgggatcagagtgatttacatataacaaatcaaactgatacgtcaggcaccgtgtgtgcgccgcttcaactctatgccgagctggagaataagggaaaagagcggactgtttctgactggaaatgggagctccataaaatcacttctcagcagcagcctttacgaaacggcaatgttgtggataaagggcttattactgataaaaaaagcaaaacgatttataaaattgagtcaaagcggtctttgcagccgggcatatacgcattcaagatttacaagcctgaagggtatccggcggacgaagaacaatttgagtggtcaaaaccgatgaaactcgtcaaatgccgggaacaggcaaccgtttccgatctgaagaaaacggagaaagagccggctgagccggtaaaagaaagcggggaagaacatgaaaaaaacgctgaaactgatcagtaatattttgtatgccgtcatcttcagcctgattattgtgctgacgttaacggtgatttcgacccgggcttccgggggtgagccggccatcttcggctatacgctgaaatccgtgctgtcgggttcaatggacccggaatttaagacgggttcgctcatagcggtaaagaaaatttctgacgtaaatgacttaaaaaaaggggatgtgatcacctttacgcaagatgacggaacagccgtcacacacagaataatcgggatcacaaaaaaggacgggaacctgctgtttgagacaaaaggggaccataatgccgccccggatgccgcccccgttcaagctgaaaaagtggcggcccagtatacgggatatcagcttccgtatgcgggatatgtcatacatttggcaagccagccgatcggaacggcgattctgttaatcgttcccggcgtcatgcttttgatttactcaataacagtcatcgtcagcgccctccgcgatattgagcggaaaacgaaagcgctggaagaacatgcgaaaaagagaaccatctccacatgaatacggttgcaacctggcgacaggatttgataacaaaaaataaaaagtaaggggagtacaaacatgggtatgaaaaagaaattaagcttgggcgttgcctctgccgcactcggtttagcattagtaggaggaggcacatgggccgcatttaatgatgtgaagtcgacggacgctacatttgcgtcaggaacacttgatttatcggctaaagaacaatcagccaatgtcaatttgtcaaacttaaaaccaggtgataaattgacgaaagattttgaattcagaaacaacggttcacttgccattaaagaagtgctgatggctttgaattttactgactttaaaggagcaaagaaaggcaatgaatctgcggaggatttcctcagccagtttgaaattacggttctgacagtcggtaaagaagggggcaacggctatcctaaaaatatcattttaaaggcggccagcctgaaagacttatacttaatgtcaacaaagcaggataaagcagctgccgaagcgatcagcaagcacattgatccgaaattcctgagcgagagcggaaaagtcaatgtggcaaccattaacggcaaaacagctcctgagtacgacggagttccgaaaacgcctgctgattatgaccaggtgagaatggaaatccaatttaaaaatgacaccgcaaaaactgcggacggattaagtgtgcaaaacaagttccaaggcaatgcgatttctcttcaattctcttttgaagccacgcaatggaacggcttgaccattaagaaagatcatacggataaagacggttacgtcaaagaaaatgaaaaggctcacagtgaggataaaaactaatccgaaagtcggacagttaaaagaggagttgtgcacatatggcggcactactcctctttttgcgcttttctccatttttgataatctaaaaattcacgaaattgtttttttgataccccggatgtcatcgcatcgcgaactaatttctcccattcactatctaattgaccatcgtattcggtttcatgtttttcatcaagtaaagtatgaaccgagacgtccagaacagcggagactttttcgagaaattgaatggaggggttcgtctgtaaatttcgttctattgagcttaaataagacttcgctaccccagctttttcagctagttctgatagtgagtagcctttttcttttcggtattgtttaatacgctggccaatcaatgtcatcaccttccttgtgatattatagcacattcagaaaggatttacggtatgacttctggctgcctggatatgttgagaagactttttatgcgaaagcaggtatttgcgtatttcttctaggctgatatttgctttttgggcttctaatatcagctcaacccattccttatctaattgcgaaaattccatttttgcatttttcatgcattttctcctcctaaaatacttgtttatgtatttcagccaatccgcccatgaccttatctttacatgtctggaagtgattcatcgcatgcgaaacgccagaaattttttctatatacttttattataatatagaatttccagaaaaaacgggaaaggtgtcgaatggataacgcttatccagaaaaattactttgcaggaaaaataaaccgccgttttcaatctgaatgtgaattttcggctgatataaggctttcagcgcttgtttttccaaatggtattcctcaggtttttcttctgtctgctcataaaactgatcgagcagcctgaggtcctttttccatctggcgatcgcgctgtcagcccagtctgacggctctttggcggcagcgtcttttaagtaatgctccatccttttaatcccgctttccggcttaatcatcggcgatatggtaaagcaatagtctgatatttgcgaggtcagcggaagcggtgcaagcttctgctgaaacccttctataattgttccagaaacaagatgcaggcctaaagacaaaagtctgtcttttttcatgtcggattggtatgaaatcactacatttaatccaagccagggctgaagcggcactctggctccggctgatacaattttctcatatattcttgtaaatctcccattttgtttaactgcttgaaagatttgaaagaggcgcggggctccaaagtaaataaactcgccgtccatatcctccggagccgtttctttatcagtgatgaacgtaatcttcatcgggttcggttcgccgcccgttttttcacgccaatgccaataaaacgggcggttcataatttgtttgtccatctcgaccgtcaactgaaccgtcataaaacccggcccgtgttctgtaatcgggcagtggttcgcttcaaaaaagcgcagtaaaaattggtgaacctcctgctgtctcatgtcgcgcttcctcctttttaagagcctttttttctggcgggcttttccgtaccgtacgacagaaaagaggtgagattgtccattttgattctcatttcctcctctgtcagcgaatggcataaaatatcatgcaaatggtcttcaaaattgctcactttgatttttgttaaaatgtcatctaattctccgacgacattttcaaataaatgaattttgtcatacagaagttttaagatatgctcttccaccgtatgttttgtcgccatattgtagatatggacatctctttcctgaccgagtctgtgaatccttccgattctttgttcaagccgcatcgggttccacgggaggtcataattgataatatggttgcagaattgcaggttgatcccttcgcctccggcttctgtagcgatcagcacctgcactttgccgcggaaaagatccttcatccagtctttttttccgcgtttaaatccgcctctgaacggaacggagcttatgccgttctgctgaaggaaccattgcaggtaaatctgtgtcgccctgtattcagtaaaaataatgactttatcattaatcttttggatcaagtcaacaacttgaatcgcttttgagttttgcgtgacttgattgatgcggtccattaaattagcgatcgtctgttcatcgaatgcgggcgcttgtttgtctttttggtcaagcatttttttgagcgtcatatacacggcttccctgcttgaacagcactctctttgcagcgtcataatggaaaatgcgcttgcgggcttttccgtgccgtttttcagtgcggcaatgtcatcgtaaagcgcctgttccgtcggtgaaaaggtgatcggcactgtttccacgtggcgcttcgtccatgtaaggccggtgtcgctccgcgtgttgcggatcatcaccttattgacgagttctttcaaatgctcatgagcgtcaatcccgtccttctgattgaaggtttcttgaaatccgctttcatttcctaaatggccgggctttaacagtgacactaaattgaagatttcttcgatccggttttgaatcggcgtcgccgtcagaagcaggcagtatttcttcacaagacttctcgcaaattcataatttttcgttttgctgtttttgagcttgtgcgcctcgtcaataatgacgagatcatacggaatagaaaggacaatgtctttgtgaggggagcgtttggccgtatcaatagaagaaacgacgatatcgcactgttcccacacatagcttttcttctgttcaacagcgggtattaaaaacttctcctgaagctctttcacccactgggaaacgagtgatgccggcacaagaatcaggatttttttggccagcccgcgaatcatatattcttttaaaatcaggcccgcttccaccgtttttccgagccccacttcatcagccaaaatcgccttgccgttcattttttcaacgactttctgcgcgacctcaagctgatggggaagcggagtgaaatcgggcaggtataaaggagctctcaacccttcaaattcaggaatggcaagggtctgctggacttcagccgacagtttgtacagctcccaatttgaccagggaccgtccgttttcagccgctcagaaaactctcccggccagtttgcatcaaatatgatctctgctgtcatatgtaacaaaaccgcctttcttttaaaaaactgatttatcataatttttgttgccggacgtaaatgagggtggtaggatataagtaatgatttcactaaaagatattgctttagtatgtccataaaattggtaaatatgagcgaatgacagcaaggggagagactcggacgaaagatgggcgtccgggcgccgaaggagcaaactgcggagtgaatctctcaggcaaaagaactcttgctcgacgcaactctggagagtgtctgcacttagaagaagcaggccaccaaaggggacgtctttatgatatgttcataaagtaaactttcaggtgccgggacagagaaaccttcattttcatgaggtgtttctctgtccttttttatatgtttttacaagcgccaatgactgaagggggaagatgatgctgaaacgaacaccgctttatgatgtgtataaagaatacggcggaaaaacgattgattttggaggatgggagctgccggttcaattttcttctattaaagaggagcatgaagccgtccgcacaaaagcgggcctgtttgatgtgtctcatatgggggaagttgaagtatccggtaaagacgccctgtcttttctgcaaaaaatgatgacaaatgacgttgccgatttaaagccgggaaacgcgctttataccgccatgtgctatcctgacggcggtacggtcgatgatttgctgatctatcagaaaagcgagagctgctatctgctcgtgataaacgcgtctaatattgaaaaagacatcgcctggctgacagaacatgcggaaggagatgtcacgctgacgaatcagtctgacgggatttcactgcttgccgttcaggggccgaatgctcagtcggttcttgcgaagctgactgaatgtgatctgtcctccttaaagccgtttgcatttattgacgaggcggacgttgccggacgccaagtcctgctttcaagaacaggctataccggtgaagacgggtttgagttatattgccgcaatgaagatgcggttcatctatttaaggagatacttgcagcgggagagcatgaaggcctcgttccgtgcggcctcggcgcccgtgatacgctgagatttgaagcgaagcttgctttatacggtcaggaattgacgaaagatattacaccgattgaagccggaatcggatttgccgtgaaacacaagaaagattccgattttttcgggaaatctgtattgcgtgaacagaaagaaaaaggagccccgcgaaagctggtcggacttgagatgattgaaaaagggattccgagacacgggtacgccgtgaaaaaagacggtgttccgatcggggaagtcacgacaggcacgcaatctccgactttaaagaaaaatatcggccttgccttaatcaaaacggaattcagtgaagtcggaacggaagtagaagtggaaatccgtaaaaaaacggtaaaagcgaagatagtccgcacaccgttttataaacgtccaaaacagagctgaaaaaggagagtcatatgaagcatcgatatttgcccgcgacagaacaggataaaaaagaaatgctgaaagccatcggcgcagaaacaattgatgaactgtttgccgatattccggaagatgtgaggtttcaaaaagactaccaaattaaaaaagcaaaatctgaaacggagctgacgagagagctgacaaagcttgcggcgaaaaataaggacgctgttacatatgcgtcttttctgggcgcaggagtgtacgatcactaccagccggtcatcgtcgatcatgtgatatcccgatcagagttttacacggcatatacgccttatcagcctgaaatttcacaaggggagctgcaggcgatttttgaatttcaaacgatgatctgtgaattaacgggaatggatatcgcaaactcctctatgtacgacgggggaacggcgcttgcggaagcggcgatgcttgcgtcgggacatacgaaaaagaaaaaaatcattatttccgcagccgttcatccggaatcacgggatgttttgaaaacatacgcaaagggccaatatattgaggttgtagaggtgcccgcgaaaaacggcgtcacagatcttgaagcattggaacatgccgtttgtgatgagacggccgccgtgatcgttcagtatccgaacttcttcggacaaatcgagccgttaaaggacattgagccgctcgcacataaaggaaacagccagctgattgtttcttcaaacccgctcgcgctcggtattttgacaccgcccggggcatacggagctgatattgtcgtcggagacgcgcagcctttcggcatacctgcggcgttcggcggcccgcactgcggctattttgcagtaacgaaaaaactgatgagaaaggtgccgggccggcttgtcggccaaacagaggatgaaaacgggcgaagaggttttgttctcacccttcaggcgcgcgagcagcatatcagaagagacaaagccacgtctaacatttgttcaaatcaggcgctgaatgctttagcggcttcagtcgcgatgacggcgctcggaaaaaacggcgtcaaagacatggcccgccaaaatatattgaaagctgattacgcgagacgccaagcggaaaaagccggcttgcacgtagcatttgacggcccgatatttaatgaatttgccgtcaggctgaatcttcccgtcaaggaagcaaaccggcggctcctgcaagacggcatcatcggcggatatgacttaggtcttgcgtatccggaactggatcagcatatgctgattgccgtcacagagctgagaacgaaagaagagatcgattcgcttattgcgggattgggggatcaacatgaataatcaagatcaggcgcttatttttgaaatgtcccgcgaagggcgtgtcggttacagccttccggagcttgatgtgccggaaacagagcttgaaagccttcttcccggtgactatatccgcgatgaagacgcaaagctgccggaagtatcagagcttgatattatgcggcattataccgctctttctaagagaaaccacggagttgattcaggcttttatccgctcggctcctgtacgatgaaatacaatccgaaattaaatgaaaaaattgcccggttcgcaggtttctccgctattcatccgcttcaggacgaggacacggttcagggggcgcttgagcttttatacgatttaagcggacacttggaggagattacgggcatggacgaggtgacgctacagcctgcggcgggcgctcacggcgaatggaccggcctgatgatgatccgcgcctaccacgaagcgcggggagacttcggacggacgaaggtgattgtccctgattcagcccacggtacgaatccggcatccgccacggtcgccggttttgaaacgattaccgttaagtcaaatgagcacgggctggttgacattgaagatttgaaaagagcggtaaacgaagaaacagcggcgctgatgctgacgaatccgaacaccctcgggttatttgaagaaaacattacggaaatggctgaaatcgtccatcaggccggcggaaagctttattatgacggagcgaatttaaatgccgttttaagtaaagcaagaccgggagatatgggatttgacgtcgttcaccttaatctgcataaaacatttaccgggccgcacggcgggggaggaccgggctcagggccagtcggagtgaaaaaagaattcattccgtatctgccgaaacccgttctcacgaaaaaagagggccgtttgacttttgactatgaccggccgcagtcgatcgggcgcgtaaaaccttattacggcaacttcggcattaatgtcagagcctacacgtatatccgttccatggggcctgacggcttaaaagctgtgaccgaaaacgcggttttaaatgcaaattatatgatgagaagactcgcgccttattatgatctcccgtttgaccgtcattgcaagcatgaatttgtgttatcgggaagaaggcagaaaaagctcggcgtaagaacgcttgatattgccaaacggcttttggatttcggctatcatccgccgactgtgtattttcctctcaatgttgaagaaagcatcatgatcgaaccgacggaaacggaatcgaaggaaacgcttgatgcgtttatagatgccatgattcaaattgcgcgggaagcggaggaatcgcctgaaatcgttcaggaggcgccgcatacaacagttgtcaaaagaatggatgaaaccaaggcggctagaaagccggttttaaaatacgaacgtacacctgacgtcagccgctgacacggtataaaaaaagagcttccgtataaaacggacagctcttttttcatgattagttttttgctttaatttttccgccccattttttaaatccgcctttcaggttgtaaatatctttgcagccgtgtttgcggagcgtctgtgccgcgcgtccgctgcggacattgttttggcagtacagataaacgggtttatcaggacggatttcacttttgcgctgtttcagctgtgacagcggaatgttgcgcgcgccgagaatatgaccgccttcaaattcattcggttcacggacgtcaatcagctgcgcttttctgtagcccgcgcggaattcctcttccgtaagtgttttcattaaacgctgctggtaaaagtacgaaacgatcatataaacgataaacgccgcaacaataattaaagcaatcatattagacaatgcaattctactcctttagcttataaaatcaaaaccctgcttcctgaaaacaaggcttaccggacgttttgggacaaatactattatagtaaagcatgaagcgattgtcatccttaatgaaacgaaatatttttcattttcaaggcagtttgttaaactggttttattaaaacgataaagaagggttcagtgtatggaaaaagaaacatggcggtttattgactcagggaatgaaagcccggcatttaacatggcgctggatgaagcgcttttatattggcacagccaaaaaaaaattcctccggtgatccgtttttacggctggaatccggcaactttgtctgtcgggtattttcaaaatattaagaaggaaattaactttgacgcagtacataaacacggcctcgggtttgtcagaagaccgacaggcggacggggtgttctgcatgataaagaattgacatacagcgtaatcgtttcagaggatcacccggaaatgccggccacggtgacagaggcgtaccgggtgatttcagaaggtattctgcagggattcagaaaccttggacttgatgcctgctttgcgattccgcgaacggagaaagaaaaagaaagcttgaaaaatccgcgctcgtccgtctgctttgatgccccttcgtggtatgagctggtcgtcgaaggacggaaagttgccggaagcgcacagacacgccaaaaaggcgtcattcttcagcacggttccatcctgcttgacattgatgaggataagctgtttgatctgtttttatatccgagcgacagagtccgtgagcgcatgcagcggaatttcaaaaacaaagcggtagccatcaacgccttaacgccgaaacgggtaacgatggatgaggccagaatcgcttttaaagccggttttgaggaagggctgaacattcatcttgagccttacacactcacgtctgaagagcttgcatttgtcaatgagctggctgagacgaaatacgcgtctgatgaatggaattataagcgctgataaggcttgacagaccggaagcatccttgttttttcatgaccgttagtgtaaacttgtaatggtttataaagttaaggtgctttttgggagggttacttatgacaacaccaagtatggaagattatattgaacagatttatatgctgatagaagaaaaaggatatgcacgggtttctgatatcgcggaagctttggcagtccacccctcctctgtaacgaaaatggttcaaaaactagataaagacgagtatttgatttatgaaaaatatcgcgggctcgtattgacgtcaaaaggcaaaaagatcggcaaacggctcgtatacagacacgaattgcttgagcagtttttaagaatcattggtgttgatgaagagaagatttacaatgatgttgaaggaatcgaacatcatctgagctggaacagcattgaccgcatcggcgacctcgttcagtattttgaagatgacgaaagccggaaaaaagaattgaaatccgtacagaaaaaaaccgaaaatcccggtgaataaagggcagcccgaaatggggcgccctttttttaatgtcttcattctttggtctatttcgcccagccgtttcttaaaataataatacaccttgagatggaagggagagggcgcgctatgcagattgacggcgtattttcgggcggggggataaaaggggtggcgcttgccggcgcttatgaagcgctggaagaaaagggctttcgctttgaaaggctcgccggaacaagcgccggcgcgattattgccgcatttatcgctgcgggctatacgagcagagaggttcattccatcatagatgaggtggacggaaggcaattgcttgatcagagatactcattcctcccgctgaaaatcctgcagtgggtgtcgatatattggcgcctcggactatacagaggcgatatgctggaaaagtggattgcggataaattaaaagcgaagggcatcatcgcgttcggcgatttgaaaaaaggctcgctccgtctcatcgcttcagatctgacgaacggaacgatgatcgtgcttcctgacgatcttccccgctacggattaaatccggagatgttcccggttgccagagccgtcagaatgagctgcagcattccttatttttttgaaccgataaaactgaagaccgaaaaaggcacctcaacggtcgttgacggcggcgtgttaagcaatttcccgatttggctgtattcaaaagaacgcaaacggccggtcatcggaatttcgctttcgcccaacgaaaaagagcgcccgaaaaaatcaatccgcaacgcttttgagctgttcggggctttgtttgaaacgatgaaagacgctcatgatgccaggcatatcgcgacaaagtacgaacagaatattatttttattccggtggaacatgtgatggcgacggagtttcatctcacaccgcaaaaaaaactagctctcattgagctaggaaaaagcagaacagagcaatttttgaagcaatggagctattaaaaaagcgctctgtttttctttttattctttttgccttctatgacggtaagctgggtctggctttttttcttaagaatcatcggcttcggtctgctgctgctcggcacgctccgcaaatggctgacccggcctctgtgtccggcgcggtgcttcgctttttgctccttcattcggagccgcgattgtctggccgcttttttgaaagcggttccgtcacggccggtgcgtcggttcaggaccgtcctcacgataaaataaataataatgcctgcgataataacggtgattgctcttgaaatcatctgcccggggttggttaccgccgcataaatgaaaccgaatgcgccaagcgctatcaatacagcaaaaaaaggttgtacacgatgattcataactgcccacctccaaaataataacggtaacggttcagattacgttgtgagacggattttcgctctgttctgaaatgtcttccagtctgagaagctcgttaaagctttctatggcaacctcgacctggtcatccgccggttcctttgtcgttaaaagctgcagccacaggccgggataaccgagcactttcaaaacggggatattccgtactctgttcgtcagctggagcacttcaaaggagatgccgagaacgaccggtataagcgcaatcctgtctaaaatccgcacccaaagcggatctgtcggaacgagtaaatagacgaacatgccgacaatgatcgtaaataaaataaagcttgaaccgcaacggtaatgaagccgtgactgtttctgaacattttctattgtaattggcaaattctgttcataacagtttatgaccttatgttcggctccatgatattgaaacactcttttaattaacggcgtcattgataaaaaataaatgtagccgagaagcagaatcagcttaaacagactttcgattccgatctgcgcggcgtctgaggaaaatacgggccttacaagctccgctaagaagaccgggacgagcgtaaaaacgaatttgctgaacaaaaacgacagaacgccgatcaccgccaggctgaaaaacatcgataagccggaacccttcttctcttcctgctccagcttggcgtcatcctgaggatcaagcccgtaacgttcgctggaaaagtttaaatgctttgtgccgttggcgctcgcctcaatgatggcgacaattccccgcaaaaaaggaatcttttttaaagccgaaagcttggcgttcggcactctcggaagcttgaaaaaatcaatgcttccgtcattcctgcggatggcggtaacataattttttctgccgccgaacattaccccttcaacgacagcctgcccgccgtatgcagggggcgttttttgtttggacattgtttatcaacctgcctgttttcttaggatttactaaccatttcctttcactctattgtacaggaaaccgcggtaaacctctagttagacagccggaaaatcaatgctttttctacatgcagtataccccgtttctttagattttactcattgaatgaaaatatggcgcagctttttatgacttttcaatttttgggcagtctatgactggaggtgccatgatgacaagcgaaaaacattcagaacaggaagaaaaaaagaagcaggatgatgatcagcagcctgtttcatttaccggcagaatttgcggtatcggatttgccggcggtgtattttggagtttgatcggctatctcgggtatgtctttcatttttcagagatcagccccaacatgattcttcagccgtttatgatcggagaatggaaaaaacaatggctgggcacgatggtcagcatcgttgtcatcggattcatttcaattgccggggcgtttatttatttcgtctgcctgaagcgttttaaaaccatgtggccggggatggtgtacggcgtcattttatggtgtgcggtttttttcttattcaatccgattttcgaagatgtgaaatccgtcactgaattgaaatcagatacaatcgtgacgacgctttgcctttacattctgtacggtttgtttgtcggctactcaatttccttcaactacaatgaacttacgtcagacaagcttgcaagggcgctcggcaacaagtgaataagtgtataatccctgtccggtatggtaaaatgttcacgagaagtgaacattttttatgctgaaaaccgggcagggatgctcccgcgttgtcaggcggcagtcaagaatcggcgaggaggagaaagggaatgaaacttgagaaattgcgaaatcttttcggtcagctggatatagacggaatgttggtgacaagctccgccaatctgcagtacatgacgggatttacgggttcgtcaggccttgcggtcatatcgaaagaacgtgcggcatttatcacggatttccgttacaccgagcaggcgaagacgcaagtgaagggttttgacattatcgagcacggcggaagcttaatccaaacggctgcggatacgattcttgagtacggcattaaaaaactcggcttcgagcaaaacagcatgacgtacggaacatatgcatcctaccaagcggtgctgcaggaagcggagatggttcccgtcgcggattccgttgaaaagttgcgcttgattaagtcaagtgaagagattaagatattagaggaagctgcgaagattgcggatgatgcgtttgaacatattctgacgtttatcaaaccgggcatctcagagatttcagttgcaaacgagcttgaattttatatgagacgtcaaggagcagacggctcttcctttgatatgatcgtcgcctcgggagtcagatccagccttccccacggagtggcaagcggcaaattgattgaaaagggagacttggtcacgctcgatttcggcgcttattataaaggctattgttctgatatcacacgcaccgtcgcggtcggagagccaagtgataaactgaaagagatttatcaggtcgtatacgatgcccaagcgcttggtgtcctgcatattaaacccggcatgacgggaaaagaagcggatgccctgacgagggatcatatcaccgcaaaaggctacggacagtatttcggccattcgacaggacacgggttcggaatggaagtccatgaatcaccggggctgtctttcaggtcatcggccgttcttgagccgggcatggcggtaacggttgagccgggcatatacataccggaagtcgggggcgcaagaatcgaagatgatatcatcatcactgaggacggcaaccggacaattacgcattcccctaaagaattaattattttgtgatcggagtataggaggacatcaaacatgatttcagttaacgattttcgtacaggactaacgattgaagtagacggcggcatttggcgcgtcgttgactttcagcacgtaaaaccgggaaaaggagcggcatttgtccgttctaaattgcgtaacctgcgcacgggcgctattcaggagaaaacattccgtgcaggtgaaaaagtcgcgaaagctcaaatcgaaacaaaaacgatgcagtatctttatgccaacggcgatcagcacgtgttcatggatacaagctcatatgaacagcttgaattgaacgaaaaccaaatcgaagaagaattgaaataccttctggaaaatatgtctgtgcatatcatgatgtatcagtctgaaacgctcggtattgaactgccgaacacagttgaactgaaagttgttgaaacagagccgggaattaaaggcgacacggcgtcaggcggcacgaaacctgccaaaacggaaacaggccttgtcgtaaacgtaccgttcttcgtgaacgaaggcgatacgctggttgtaaatacatcagacggttcttacgtgtcaagagcgtagttaaagaaattcggagtctgctccttttacggggcaggcttttttttgcgttctgcctcagaatctttcttctatatgaaaatagtgagactacttccgtgagctagagcatatagtgtaacaaaatgcttgaagttgggggattgcaatgaaatttttgttcggttcaatcaattctactgttttaacgatggccggtttacgagttttgtcctcgctcattgaattatctgccgctattatcatgcttttgacaaacgacatcagaaaagcggttgtggtgaatagtattttggcaatcgtcggccctctgatctttatcatcacaatgacgatcggcatttatcagattgccggacagctctcatatgcaaaattaatattgatttttgcgggtgtggtgctgattttggccggtgtgcataaatagagggccggggtgtcataaagtctgtcccggatcatacattttaaagaagccaatcggtaaaaaggaggggactctattgaatgaaattacagaggttctccctgaattattgagagatgccatctccgccgtgcccgaagaagcgaggcgggatacagaagaaatcagaatccgggtcgacaggccggttgaactgatccaaaaaggacaacctttgtatttgtcatatgtgtgtacggccggcgacgcacagctgatcctcagccggctcagcaactatagtatgtacacgctggaagaagagctgaaaaaaggatacatcacaatcagaggaggccaccgtgtggggctggccggaagagtcatcgtcgaaaacggagccgtcaaaggactccgggatattacttcttttaatatccgaatcgcccgggagaagctggggatcgcagaaccgctcattcctttcttatggaaagaaaactggctgaacacgctgatcatcggtcctccgcaaacggggaaaacgaccttgcttcgtgatttggcccggctttccagcaccggatcaaaacgcattccggcaaaaaagacaggtatcgtagatgaacggtcggaaattgccggctgcctgcggggcattccccagcacagtttcggccgcagagtcgatgtccttgatgcctgtccgaaggcggaagggctgatgatgatgatccgttctatgagtcctgatgtcataattgtggatgaaatcgggagaatggaagactcacaagcgctgctggaggcgctccatgcgggcgtatccgttatcgtctctgcgcacggatggaatatgaaagacttggtcaagaggccgtcgctgaaaatgctttgggaggaaaacgtgtttgaccggtatgttgaactgtcaagacgccgcggtccgggaacgatcagcaggatgtacggaaaggacgggaaacctgttccgcatgctgaaagcgtgatgacatgctgaagcttttgggtgccgtgttcattctgacagcgacgacatggacgggatttgagatcgccaaaatgtatattgaaaggccgagacagatccgtcagctgcgcgcggcgctgcaatcgcttgaagcggaaatcatgttcgggcatacgccgctgcacatagcttcgggacaaatcgccgcacagctttccaagcctgtatcgtcattgtttcaagctttcagcaggaggcttgagcagggaagcgattccgccaaaacggcctgggaacagagcttgaaacataactggccctccatggcgatgaaaaaaagcgaatacgatgtgctgaagcaattcggagagacgctcgggctccatgaccgtgtttctcagcagaaacatatcaagcttgcgcttacacatttggaagcggcggaagcggatgccggacgggcgcaggcgaaaaatgaaaaaatggtgaaaagcttaggatttttagccggactgttactcattcttctattgatgtaaacatgaggggagcaaacataaaatgggagtcgacgtaaatgtcatttttcaaatcgccggagtcggtatcgtggttgcgtttctgcacaccatacttgaccaaatgggaaaaaaagaatacgcccaatgggtgacgctgcttggctttatctatattttatttatggtggcgacgattgtcgatgacctgttcaaaaagatcaaagctgtgtttctattccaaggataggggggcttacagattgagattgttcaaattgtaggtttaggcctgatcgccacatttctctccctgatcgtaaaagaacagaaaccgactttcgcgtttatgattgtcgtcttcagcggctgcgtgatctttctctatctcatcgatcagatttacgacattatcagaatgatagaaaaaatagccgtcaatgcaaatgtcaatatggtctatgtggaaaccattttaaaaattatcggcatcgcctacatcgctgaattcggtgcgcagctgacaaaggatgcgggccagggagcgattgcttcgaaaatagagctggccggaaaaattttgatactggtaatggccgtgccgatactcaccgtcattattgaaacgattctcggacttattccttcttgatcatcaataaaatggaaaggggggcacaaaaaatgaagcgctttcggtgggcgggggcttttttgttcatcctcttattttttcagactgaatgtgtacaagctgccggaacagacggtgcgtcgcaggaaaccgcagttcaccaagaatccgctgatgaagtggcgaaaaagcaggccgaagcgctgaaaacagaaggcatcggaaagttttgggacgacatcatgacagaatacggcggtcttctgcctgaaagccaaaagggaagcatcatcgactttattaacggtgaaaaaacgttctcgccggaggcatggctgaaggctttattttcatacttgtttcatgaagtgctcgcaaacggaaagcttctgggaactttgattcttctcaccattttttgtgtcattctgcagcttttgcaaaatgcgtttcagcagagcactgtcagcaaagtggcttatgcaatcgtctacatggtgctgattattctcgctttaaacagctttcatgttgccgtcaattatgccagtgaagcgatccagacgatgacaagtttcattctcgcgctcatcccgcttttactcgcgcttttggcgtcttccgggggagccgtctccgcagctttttttcaccccgttattttatttctgatgaatacgagcggccttctcattcaaaacattgtcatgccgcttattttcctgtcagcgattttaagcatcgtcagcacgatgacggatcaatataaagtcacgcagcttgccaatctgctcagaaatatcgcgatcggcgcgcttgccgtatttctcaccgtgtttctcggcgtcatctccgtacagggggcttcggctgccgtgacggacgggattacgctcaggactgcaaaatttatcacaggcaattttattcccgtgctcggccggatgtttacggatgcgacggatacggtcatcagcgcatcgctcctattaaaaaacaccgtgggaatcctaggagtcggaattttgatctgcatctccgcgtttccggcgatcaaagtgctctcgctcgcttttatttataagctcgcggccgctattctgcagccgctcggaggcgggcccgtcattacgtgcctcggcgtcatcagccgaagcgtgctgtatattttcgcggcgctcgccatcgtctctctcatgtttttcctcagtattacagtcattattacagcaggcaacctcaccatgatgatgaaataaaggaggcccattggatatgagctttttaacagaatggctgacaagcattattttgtttatcttattcgccatcgtcatcgacatgctgctgcccagctccagtatgcaaaaatacgccaagatggttgtcagcctgctgttaatcattgtcatgctcaacccgatcttcaaacttttcaaaacagacccggaaatcatcttcgattatttgacaaaacaagagcaatctcaatccgctgatataaaaaatcaaatcaaatcagaaaaaaaagaaatacaagcatcaaaccgcgcatatgttttagaagaaatggctgtccaactaaaaaagaaagcggaggagatgttcagtcatgacgaatacaaaatagacgacatccgccttacagcggaagaacaggttcgttcagaagaagatgtaaaaacgatcagcgtgtatatggccccatcttctgaaaaaaccgtgcaaaccgtcgcaccgatcgacatccgcacagaccgcaaatacgaaccggaaggcgcagccgaaaaaaaagaggccgcagacatcaaagaaaaacttgcggatatatgggaaatcggcagtgagaaaattacggtttatatggaaggcggggagaaaaacggccatgaataaaaacggactatggaccatactcaaaaaacagctgatgatcggacaggcgaaagacggagaaaaaccaaaactgacaaaatatcattactttctgttcgtgtttgtgctcggagtatcttttatgctggtgagccagctgttctcttcaccggagaaaaccgggaaggaccaagcggcgcagaccgtcatgtccggccgaacggaagacaaaagcgggcaaaaaagcgcacccgtttttaaggcatcgaaagacagcagcgccaaaaacacgatcgatgattatgaaagagactatgaaaaccagctgaaagaaatccttgaaacgattatcggcgtggaggatgtatcaattgtcgtgaacgtagacgcaacatctttgaaagtgtttgagaaaaataaaacgaaaaaagacaccaccaccgaagaaaccgataaagaaggcggcaaaagaagcgtaaccgatcaaacctctgaagaacaaattgtcatgattcgaaacggggatcaggaaaccccggtcgtcgtccagacgaaaaagcccgatatccgcggtgtactcgttgtcgctcagggagtggacaacgttcaaataaaaaaaaccatcattgatgccgtcacaagggtgcttgatgttccgagctaccgtgtagcggttgcccctaaaaaaatcaaggaggattcataaatcatgctgaaaaaacaaacggtttggcttttaacaatgctcagtctcgtcgtggtattaagtgtttattatattatgtcgccggaaagcaaaaatgccgtgcagatgaaaagcgaaaaaagcagcggagaagtggcaactgaaaaaacgccggctcctgaaacgaaagataagaacggaagcggcacggataaagaagacggaacaaaaggaacgaaagattctaaaggcgcaaaagaggataaagaaacatcagccgaagcatcggacaaagacggatcggtcgctacagaaacagctgatgaaaacttatttaccgcataccgcatggaacttgaagacgcaagaagcaaagaaagggaacagttaaacagcattgtttcaagcgatgatgcgaccgcaaaggaaaaaagcgaagcctacgataaaatgacggcgctgagcaatgctgaagggacggaaaaacagctggaaacgctgattaaaacacaaggctacaaagatgcgctcgtggatgctgaaggagacaaaatcaacattacggtcatgtctgacaaacattcaaacgcaaaagcttccgctatcattgacctggtggaaaaagaaatcaagacgatgaaagacgtcgccgtcacgtttgaaccgacaaaataagagatctccaccgcccgcacccgctgcgggcttttctgatgtcattttagatcagtgttgaatttacacaagcgctcctgtaagataaacatagtatgtacttttagtagcaacccataaatttctattttttatacataggagtggaaactgatgttaaaaatcaacgaaattcatgaactgataaaaagaatcgatgaatcttccatcgacgaattcgtttacgaaatcgaaggcgtaagcctcaaactgaaaaaaaatgaagcgccggcagtgaatgtaacgggacaagctcaagccgttcccgccgcttacgcacctgctccgcaggctgcaaaaccggaagcgcatgaagccgctcctgttcaggaagcgccgaaacaagacgaaaacctgcacaaaattacgtctccgatggtcggaacgttttatgcttcttcatcgccggaagccggcccttacgtaaaccaaggttcaaaagtgagcgaaaatacagttgtttgtatcgtagaagcaatgaaactctttaacgagattgaagccgaagtaaaaggagaaatcgttgaagtgttagttgaaaacggccagctggtcgaatacggacaacctctatttcttgtaaaagctgagtaaggagacctgctattatgattaaaaagctattgatcgccaaccgaggagaaatcgccgtcagaatcatccgggcctgcaaagagctgggcattgaaactgtagccgtttattctgaggcagataaagacgccctgcatgtccaaatggccgatgaggctttttgtatcgggccgaaaacatcaaaagaaagctatttaaatgtaacgaacatcgtcagcgtcgcaaagctgaccggcacggatgcgattcatccgggatacgggtttttagctgaaaacgccgactttgccgagctgtgcgaggaattgaacgtaacgtttgtcggccctacggctgacgccatttcaaaaatgggaacaaaagatatcgcgcgcgacacgatgcagctggctggtgtgccgattgtgcccggttcaaaaggaatcataaaaaataccgaagaagcggtttcgcttgcaggtgaaattgggtatcctgtgattataaaagccactgcgggcggaggcggaaaaggcatccgggtcgcacgcacagaagaagaactgatcaaaggcattgagattacccagcaggaagccgctacggcattcggaaatccgggtgtgtacatcgagaagtacatagaagatttccgccatgttgaaattcaggtgcttgcggataattacggaaacacgatccatctcggagagcgtgactgttctatccaaagacgtctgcaaaaacttcttgaagagtcaccgtcacctgcgcttgattctgaaatcagggagcagatgggcgaagctgcggtaaaagcagcgaaggccgtcggttacacgggagccggcacagtagaattcatttatgactacagagaacagcgctactacttcatggaaatgaacacgcgtattcaagtagagcaccctgtcacagaaatggtgacgggaacggatctgatcaaagaacagatcaaagtggcatccggacaggagctttcgctcagacaggaagacgttgaatttaacggctgggcgattgaatgccgcatcaatgctgaaaatcctgcgaaaaacttcatgccttcacccggtaaaattaacatgtacctgccgccgggcggactcggcgtacgcgtggattcagccgcatatcccggctattcgatcccgccgtactatgacagtatgattgctaaagtcatcacatacggaacaacgcgtgatgaggcagtcgcacggatgaaacgcgcgctgagcgaattcgtgattgaaggtattgaaacgacgattccgttccatctgaaactgcttgaacacgaaacatttgtcagcggagagtttaatacaaagtttttagaaacatatgatgtaatgggctcataatttttgcgggaggtgaattgaatggaagacaacagtgtgcttaaaatggatcatgacgaggctcatttaggcaaggttgaaattgctcctgaggtcattgaagtcattgccggcatcgccgcttccgaagttgaaggagttgctgaaatgcgcggcaatttcgccaccggcgtcgtagaacgcttcggcaaaatcaatcacggtaaaggcgtaaaggtcgatttagccgatgacgggattaccatcgacgtctattgcgtcgttcaattcgggatctcgatcccgaaagtggcggcaagcgttcaggagaatatccgccaaaccttattaaacatgacgtctctgaccattaatgaaatcaatattcatatcgtcggcattcaatttgacacgaaagcccaagaagtcgaaatcgacgaagaaatgtaatgagcgtataaaaaccaaggggatgggcagccctttggttttttatacgtttcccgtcatttcaggcatgaagaaagccggcttacaaacggcagccgagtttcttcatgctgtgaaatccgaatgaaattaatacggtttgtgaaaatattcggcattagggtgaaaaaacctaaatttcgacatgcgattgagaaaaaaatatgttatgatctctttaagcttaacgacaagcggataaagcggatctgaaggagaaagaaaatgaaaagaagaacagctagagaaaaagctttgcaggcactttttcagattgatgtcagcgatattgcaccgaacgaggccattgagcacgcgcttgatggtgaaaaaacagatgccttctttgaacagctggtgtacggagtgatcgaacatcaggttcagcttgatgaaatgatttccggccatctcgtcaattggaagcttgaccggattgcaaacgtagaccgcgcgatcctgcgtctggcggtgtatgaaatggtttatactgacgacattcctgctaacgtgtcattaaacgaagcaatcgagctggcaaaacggttcggcgacgataaagctgcaaaattcgtaaacggggttctttctaacattaaaactgatatcgaatcataggaggaaagaaaatgactgcaacaatcatcgacggaaaagaaacggctaaagaaaaacgcgaacaattggcaaaagaagtagaagagctgaaagcacaaggcgtagtgcccggtttggcggtcattttaatcggagacgatcccgcttctgtttcatatgtgacaggcaagaaaaaagccgctgaaacaatgggaatgaaatttaaacttgaccgctttgactcaagcttaaccgaggcggagcttttaacagtgattgatcagtataatcaaaatccggaattccacggcattctcgtccagctgccgcttccggatcatatttctgaaaaagccgtaatcgagcggatctctcccgataaggatgttgacggtttccaccctctcaacgtcgggaaaatgctgcttggcgaagatacatttctaccatgcacgccgcacggaattgtcgagttattgaaaaagacgaacgtagatctttccggcaaagaagttgttgtagtcggacgaagcaatattgtcggtaaaccggtcggccagctgctgctgaacgaaaacgcgaccgtcacatattgccattcccgtacgaaaaatatgtctgagcatacgaaaaaagcagatattcttgtggtagcggtcggtaaagcgaatttcatcaaagccgatcaaatcaaagagggcgccattgtcattgatgtcggcgtcaaccgtctcgaaagcggaaaactctgcggagacgttcagtttgatgaagcgaaagaaaaagcatctttcattacgccggtgccgggcggagtaggtccgatgaccatcacaatgcttgcgcataatactgttaaatctgccagacgtacgttatcatagataaccggagacagtcacaaaaagtgtgacaatgagcacgatacccgcttcttaaggctcctttcagccagagcgggttttcttagtttagggcaaaaagcctttatgaaaggagtgcaggatgtgagtgaagcggcatatgtcacggtttccgcgctgaccaaatacattaaacgaaaattcgatgtggaccctcatcttgaagacatttggattaagggtgagctctccaatgttaaaattcatacgagaggccacatctattttacattaaaagatgagcatgcccgcatgcaggccgtcatgtttcaaagacaaagttcgaggcttgcgtttaagcccgaggacggaatgaaggtcatcgtaagaggcggcatttccgtctatgaaccgagcggaagctatcagctgtacgcgaaagaaatgcagccggacggtgtgggggcgctctacttagcatatgaagaattaaagaaaaaacttgccggcgaagggttgtttgatgaccggcataagcaggccatccccgcttttccggctacgatcggggtcgtcacgtcaccgacgggagcagccgtcagagacgtcattaccacactcaaaagaagatacccccttgtgaaagtcattgtgcttcccgcgctggttcaaggtgaaaatgccagcagatcgattgtgaagcgcattgaagaagccaatgcacaaaaaatgtgtgacgtcctgatcgtcggaaggggagggggctcgatcgaagaattgtgggcatttaacgaagaaagcgtagcccgggcgatttttgcttccgccattccgattatatcagccgtcggacatgaaacggattttacaatcagtgatttcgtcgcggatatccgggcggcaacgccgacaggagcggcagaaattgccgtcccccatacgacggacttaatggaacggacaaaaacggcggaagtccggctgacaagagcgatgcagcagcatatcagcaagaaaaaagaacgggttctatcgctccagtcatcctacgcgttccgttttccgaaacgattgtatacccaaaaggaacagcagtttgatcttttgtatcagcagttccaatcacagctcacagggcttacggacaggaaacaaaggcagctggagcggaatacgtacagattaacggcgctccaccctgaaacccagctgaaacaggcgaaaaaacggtacgaggagcgctcaaatcagctcgcccgaagcatgaatgtccagctgaagcagcttcattcgcagtttcagacggttcttggtaaactgaatgcattaagtccccttcaggtgatggagagaggatacagtctggcctataaagataaagagctgatcaaaagcgttgatcaagtggaacaaaatgatacgcttgaagtaaagatgacagacggcgttctgacgtgtgaagtattgcaaaagagaggcgaacgaaaatgacagaaaccaaaaaaagtgaagagctgacatttgaagaggcgatgaaaggccttgaaggcattgtggcaaagcttgaagaaggagacgtgccgcttgagcaggcgattaattattttcaggaagggatggccctttcaaaaatgtgccatgaaaagcttcagcatgtcgaaaagcaaatggactttattttaaaagataacggcgaacttgcacctttcagcgttcaggaggaagacgaaggtgacaaataaactggacgcatttttagcatcgcgcaaaaaactgattgaacagcagctttctttgtatacggaacggcttgcgatgcctgaaatcctcaaaaaatctatgctgtattctttggaagcgggcggaaagaggctgcgccccctcgtcgtcttagccgttctgaatgcttacggaaaagatgaaaaagacgggattccggtcggatgcgctgtcgaaatgattcatacgtattccttaatccatgatgatcttccttgcatggacgatgatgatctgcgccggggaaagcccacaaaccataaagtcttcggagaagcggcagccgtattggccggagacgggcttctgacagaaagctttaaattgatcacatcccacgtgtctgaggcggtttcagcagaaaaacggctccgtctcgtcgatgagctgatcagcgcggcaggaacggaaggaatggtcggcgggcaggctgccgacatggaagcggaacaaaagcggataacgcttgaggagctggaatccatccacgagcggaaaacggccaagctcctcggtttttctgtgacggcgggcgccattttggcagatgcgccggaggatgaagtcgaaaagctgcgtctgttcagcagccatatcggcatcggatttcaaatcagagatgacatccttgatattgaagggcatgaggagaagatcggcaaaccggtcggctcagacacgtcgaatgaaaagtcaacgtatccgtcgcttttaacgcttgaaggcgcgaaagagaagctggcgtatcatatcagcgaggcgaaacggatcatcagcggcctttctcttcagaaagaactgctgcatgacctctgtgatttaatcgcggcgagagatcattaaaaacggtcctgatttgaaggggctgccgctcctatggtaaaatgtaagcagtttcgatgaaaatacaaagggagtctttttcttttttcaaaaagacactgtttaatttgcagaaattcatgctgaaagtgagttgatccgctttggatcttttatcaatacaggacccgtcatttcttaaaaagatgtcaattgaacagctggaagagctgagtgaggaaatccgcaatttcctcatcacatcgctgtctgcctctggcggccatatcgggccgaacctcggggttgtcgagctgacaattgcgcttcacaaagaatttgacagtccgaaagataaatttttatgggatgtcggacatcagtcctatgttcataaactgttaaccgggcgcggcaaggagtttgaaaccttgcgccaatataaagggctttgcggtttcccgaagcgcagcgaaagcgaacatgacgtatgggaaacaggccacagctcaacatcgctctcaggcgcgatgggaatggcagccgcccgtgatattaaaggatcgaaagaatatatcatcccgattatcggagacggcgctttaaccggaggaatggcgctcgaagcgctgaaccatatcggtgatgagaaaaaagatatgatcgtcatcctgaatgataatgagatgagcattgcgccgaatgtcggggcaattcattctatgctgggacggcttcgcacggccggcaaatatcaatgggtaaaagacgagcttgaatatttatttaagcgcatcccggccgtcggcggaaaattggccgccacagcggaacggataaaagacagcttaaaatatatgcttgtgtcaggcatgttttttgaagagctgggctttacgtatttaggccctgttgacggtcattcctaccacgaactgtttgaaaacctgcaatacgccaaaaaaacgaaaggtcctgtccttttgcatgtcattacgaaaaagggcaaaggctataaaccggctgagaccgacacaatcggcacatggcacggaacggggccttataaaatcaatacgggtgatttcgtcaagccgaaagccgcggcgccttcatggagcggacttgtcagcggcaccgtgcaggagctggcgcgcgaggatgacagaattgtcgcgattacaccggctatgccggtcggctctaagcttgaaggatttgcgaaagaatttcctgagcgcatgtttgacgtcggaatcgcagaacagcatgcggcgacaatggccgcgggaatggcgcttcagggtatgaagccgtttcttgcgatttattcgacctttttacagcgggcgtacgatcaggtcgtccatgatatctgccgtcaaaacgcgaatgtatttatcggcattgaccgcgccggtttggtcggcgctgacggggagacgcatcaaggcgtctttgacatcgcctttttgcggcatataccgaacctcgttttaatgatgccgaaggatgaaaatgaaggccgccatatggtcaatacagccctttcatacgaggaaggtccgattgcgatgcgcttcccgcgcggaaacgggctcggcgttaagatggataaagagctgaaaaccattccgatcggaacatgggaagtgctccgtcccggaaaagacgcggtcattttaacattcggtacgaccattgaaatggcgctggaagcggctgaagaactgcaaaaagaaggcctgtccgtgcgtgtcgtgaatgcgaggttcataaagccgattgataaacaaatgatgaaggccattcttaatgaaggtctgccgattttaacgatagaagaagctgtgcttgaaggcggattcggcagcacgattcttgaatacgctcatgacctcggcatgtatcatacaccgattgacagaatgggcatcccagaccggtttattgaacacggcagcgtaaccgccctgcttgaagaaatcggtctcacgaaggctgaggttatgaatcggataaaactgctgatgccgccgaagacacataaaggaattggatcatgacagcaaaaaaagaacgattagatgtacttcttgtagaaaaaggccttgcggaaacgcgggaaaaagcgaaacgcgccattatggcgggcatcgtatactcaaatgaaaaccgattggacaaaccgggtgaaaaaatcgcccgggatcttccgttaacggtaaaaggaaaccctcttaaatacgtcagcagaggcggattaaaacttgaaaaagccttggaagtgtttcctgtctcggtaaaaggcaaaacgatgattgacatcggctcgtctacagggggattcacggattgcgccctccaaaacggagctgagcggtcctacgcagtggatgtcggctataatcagcttgcttggaagctcagacaggacgagagggtcgtcgtcatggaacggacgaatttccgctattccgagccttccgatttcacagagggtttgccggaatttgcgacaatcgatgtttctttcatctcactccgcctcattctgccggttttaaaaacgctgcttgtaccggggagcgattgtatcgcactggtgaagccgcaatttgaagccggacgggaatccgtcggaaaaaaaggcattgtcagagatcccggcgttcatgctgacgttctccgccgcatgaatcaatttgccgcttctgaaggatatacagtgaaaggactgtccttctcaccgattacagggggagacggcaatattgagtttctgcttcatctggaatggggcggagaagacggaaacggcgctgaactgccggaagaagatattctccgtatcgtccgcgaagcacatgagacattaaaagccaaaaagacagatgtaccggaataatagggggctattattccttttttctgccatcatgtactttttatcaagaagcggttaacataatgacaagaacagcttgaaaacagaggtgcttacatgacaaaaggccaaaggcatataaaaatcagagagcttattacaagccatgagattgaaacgcaggatgacttagttgacatgctgagagaagaaggatataaggtaacccaggcgactgtctccagagacattaaagagctgcatctcgtaaaggtgccgacgaacaacggctcctacaaatacagcctgccggcggatcagcggttcaatccgctgtcaaaactgaagcgttcattaatggatgcgttcgtaaaaattgactcagcaagccatatgatcgtattaaaaacgatgccggggaatgctcaggcaatcggcgctctgatggataatctcgaatgggaagaaatcatgggcacgatctgcggagatgacacgatcttaatcatctgcaggacgcctgaagatacggaaggcgtacaaagccgtcttttggagctgctgtagcgtaattatcagataaaaggtggaatgctgtttgttagctgaactatcaataaaaaactttgccattatagaggaactgacgatttcgtttgaacgggggctcaccgtcctgacgggagaaacaggggccggcaagtcaattattatagacgccgtttccctattagtcggcggacgcggctcgtccgaatttgtccgttacggtgaaacaaaggccgagcttgaaggactgtttctattggacagcggtcatcccgtttttgaagtatgccgtgagcagggaatagacgcatctgacgacatgattgtcatgagaagggacatcaatgccggaggaaaaagcgtctgccgtgtcaacggaaaattagtgacgattgcggctttaagggaaatcggcagacttttattagatattcacggacagcatgataaccagctgttaatggaggacgacaaacacttggagcttttggataaatttgcgggcgctgaggccgaatccgcgcttcaggcttaccatgaaggctatgagcgttatatggagctgctcaaaaaagtgaagaagctgtcagaaagcgagcaggaaatggcgcatcggttagacctgattcaatttcagcttgaagaaatcgagtcggcgaagcttgaattgaatgaagacgaacttcttcaggaagagcggaagcagatatccaactttgaaaaaatttatgaatcattgcaaaacgcctataatgcgctccgcagcgagcagggggggcttgactgggtcggaatggcctctgcccagcttgaagatatttcggatatcaatgaaccgctgcaaaagctgtctgaaagtgtgtcaagttcctattatctgctggaggatgcaacctttcaaatgcgcaatctgttagatgatctggaatatgacccggaacggctgaattttattgaaacccgtttaaatgagatcaaacagctgaagcgcaaatacggagcgacggtagaagacattttggaatacggctctaaaatagaagaggaaatcgatcaaatcgagaaccgcgacagccaccttgaagccctgaagaaggaattggagtcggtcggcaaagatgtggccgtagaagccgccaatttatcaaaaatcagaaaagcatgggccaagaaactggcggaagcgattcatcaggaattacaaagtctgtatatgggcaaatcaacgtttgatacggaatttctcgtgaaaaccgatccgtcagccagtgaagcaccggttgttaacgggcagcccgtgcagcttacccaaaaggggatcgaccttgtgaagtttttaatttcaacaaacaccggtgagcctttaaaaccgctgtcaaaggtcgcttccggaggcgagctttcaagggtgatgctggcgatgaagagtattttttcttcccagcaggatgtcacctccatcatctttgacgaagtggacaccggtgtaagcgggcgggttgcccaagccatcgcggaaaaaatccataaagtatcgaccggttcacaggtgctctgcattacacacctgccgcaggttgccgctatggcggatacgcaccttctgatcgcaaaagaattcaaagacggacggacgacaacgcatgtcacgccgctttccaagcaggataaggtagcggaaatcggccgcatgattgcgggtgttgaagtgaccgatctgacaaaacggcatgcacaagagcttttaaaacaggccggacaggtaaaaacgacaggataagctgctgatacaggcagcttattttttgttccatttctctaacagtgtatccaatgtttttcttcgtatgccggttataaatcaagcgcaggaaggcaaaagtatagatgtagcagaaaaagaaagtggtgtgggataggagcgaggagagtgaaggaatgaatgcacgataacatgaggaaagcaataggtgtaattctccttgtttctttactaagtgtaggcttttttaagccgtttaaagaatatttactgataccgtcagaaatgagcgtctttgaaaaccagacacaggccgttccggtcaatgcatcaataagcgctgaaaagggcgaattatcagaagcctttacgctgaaagaagagcacggtcatgcaaacataacagggcaaacacaaggcaggtcagaagtagtatatgatcttgccggatttcccattaaaaaaacgaaagtgcgtgtccttcctgaattgaaggtcattccgggcggacagtccatcggtgtaaaactgcattcagtcggtgttttggtcgtcggttttcaccaggtgatgacaaaggatgggaaaaagtctccgggagaacaagcgggtattgaatctggcgacatcattattaaaatgaacggacataaaattgaaaaaatgagcgacatcgccccgtttattcaaaaagcgggcaaaaccggtgaatctctggatttattggtgaaacgcgataagcaaaaaatcaaaacaaagctgattccgacaaaggacgaagccgaggggaaatatcgaatcggcctttatatccgtgattcggcagccggcatcggcaccatgacattttttgaaccgaaaacaaaaaaatacggcgcattgggccacgtcatctctgatatggatacaaaaaaaccgattgttgtagaagacggagaaatcgtccgttctactgtaacatcgattgaaaaaggaaaaggcggcaatccaggcgaaaaactggcaaggttttcgtcagaacggaaaacgatcggcgatattaaccgcaacagcccgttcggcatttttgggacactgcatcagccgattaaaaacaacatttccgacaaagcgcttccgattgctttgtcaaatgaagtaaaaaaaggacctgcgcaaatgctgacggttatcgaaaacgataaagtagagaaatttgatattgaaatcgtcagcaccacgccgcaaaaattcccggcgacaaagggaatggtattgaaagtgacagatccgaaactgctgaaaagaaccggcggaatcgttcaggggatgagcggaagcccgatcatccagaacggaaaggtcgtcggagccgtaacccacgtatttgtcaatgatccgacaagcggctatggcgttcatatcgaatggatgctgtctgaagcgggtgttgatgtttacgggaaagacaaagcaagctgactgccggatgatccggcagtttttttatgtgatgcgttcttcacttctttccgggattcatgtaaaataagacatgaagatttttcgacaaattcacgtttcctgatttgtcaaacttaatttttagtcgaaaaacctagaaaatgctagaaaaacaaagatataccactattattggtaaatatggattttttaaaaggggaagtagtggttttgtcgaatgtaacatatagcagtcaaatgggttgcgtcctgttaatacattgggggaggaagaaacgtggagaaaattaaagtttgtgttgctgatgataatcgagagcttgtaagcctgttgagtgaatatatagagggacaggatgatatggaagtgatcggcgttgcttataacggacaggaatgtctttctttgtttaaagataagaatcccgatgtgctcgtgttagacattatcatgccgcatctggacggacttgcggttttggagcgtctgcgtgaatcagagcttgagaagcagccgaacgtcatcatgctgacggcattcggtcaggaagacgttacgaaaaaagccgtcgatttaggcgcatcctatttcatcctgaagccgtttgatatggaaaaccttgtcggccatatccgccaggtaagcggaaatgtcagcagtgtcacacaccgtgcgccgtctgcgcaaagcagcattatccgcagccagccggagccgaagcggaaaaatctcgatgccagcattacaagcattatccatgagatcggtgtgcctgcccatatcaaaggctatctttatttgcgtgaagccatttccatggtgtataacgatattgaactcctcggcagcatcacaaaagtcctttatcccgacatcgccaaaaaattcaacacgaccgcaagccgtgtagaacgggccatccgccacgccattgaagtcgcatggagcaggggaaatattgattccatttcttcactgttcggatatacggtaagcatgacaaaagcaaaaccaaccaactcagagttcatcgcgatggttgctgacaagctgagattggagcataaagcttcgtaacgcaagcctttggctaaatgtctttttgcgccttctattccgtgcatgaacgcggaagagaaggcgttttgagattttgctgacgaaaacaatgggaaccactcacgccggtacttgttctatacataaatacgggaactgccgtctatacgtataataccggagctgatattttaatgattttgccgtctctgaaataaaagcgggggatgcggcggcttaacacagaaaggacttcgtagctgatcgtaccgagcatttcggcaatttcatcaacggaaatctcggctccttgttgtttgccgtagatgacgacttcttctccttgtttgccctcattctcacctaaactgaccattatcatatccattgtcactctccccgccaccggcacccgtctgccgcggtgcagaataaacccgcggttggacagggcgcgggagtaaccgtcagcatagccgatcggaatcgtcgcgatgatttcacccggttcggcgatatatgtggcgccataactgacggtccggggatctgtcaccatagctttcacataagcgatacgcgcctttaaacttagtgcgggtgtgagatccacgaggttcagttcctttatcgaggcggacggatataaaccatataacccaatacctaaacggatcatgtcggcgctgaattccgggaatgcgatagcggcggctgtattgcacatatgcacggtaggcagcgtaatgtcttgattttttaaaaagcggagaaagctgataaacttttcgtgctgcagcatcgtcagctcagtgtccggttcatccgctgttgaaaaatgtgtaaagatgccatcccatgacaggtatgtactcgacttgagcgctttcaccactgctaaaagatcttcttctgtgcgcacacccagccggcccattccggtatccacattgatatgaatggacagccgtttcgactctgcttctttttccaatatccgattcgcttttttgatccagctgacctgaaacgctgataatgtgatgttccaaacggcagattttttcacacagctgagagctgtgaagccgagcacaagaataggcgctttaattcccgctctccgtaacacaattccctcttcgacgctggcgacagcaagctcgctcgccccgctttccagtgcctgccgcgctacttccacagagccgtggccataagcgttcgcttttacgacggccataattttagacgtattcggaatatggcggcggatcgcccgtacgttcttttttatcgcatcaaggtcaacttcaatccaaacttcccggcaaagttttttcatcacgattccttctttccttaatgagattcagtactcatgctttcaatctgcattctattcatctttaactgaaatcattcaaaacatgagaaggtgaccgctgatgtttaaaatcaagttttcgggaaagcatgcgcctgctttatttatgcagtaagggcagcatggcggcccttacaatgactttacaatattctgatctgaaaattgatgttcaaacattttggactggcttacagcattgttttgaatgacaatgccgatatttccccctccggcaccgaaaacggtttttgatgcagtcagcggactgatggatatggcgccgccaacattgacaactccgtttcctgatacgttgtttatcgtaatcgggcaaccgctcattctattttttctcctttctctcacagtctactaactatatgtacgctgtgatatggaataagattaaacaaaacggcaaaaagaatccggctgctgccagccggaaagggagggaaatacggatatcataatgttttcgttacattttgatcagagtattgagagtttgaagattgagatgtgctggattgattcatttgcaggaccatacctgtatttccccctcctgagccgtagacggtttttgatacggttaaaggacttatcgaaaacgcaccgccgacattgacaaccccgtttccggaaagactgttaatcgtaatagggaaaccagccatcatatacggtctcctttctattaatctatttactatatgtacgctgtgtgttagaaataggagtaaacaaagcggtaaaaacttgtgaatcaaaaaaactgccggacatccggcagttttttagtctacttttcaaacggcacccagccgcctgtattctgaatcatttcccataacggttcaggaagtcggtatttatcaatttcagatgcctgaatggctttttcgatttcctgttcgcggccttctttgaccagcaccgcccattcggggttaatcaaaatgacacgtcccagagccaccagcggaattccgctttctaatacggcaagcgcttcgtccgcggtatagatggaaccgacggccatcagcggcactttatggccgacgcgttcgtttaataaatccatccgggtccgtgaagtatccgcgccgcggcgggctttggaattgacatccatcagtgaaatatgcagataatccaagttctcttccgcaagcgcgtcggcgagcatgaatgtttctttcattgtaagccccggtgtttccggctcttccggtgacaggcggtagccgagaacgaatggattttcagcgtgtgtatcaatcgcctgtttgacagcgtcaacgactgcaagcgggaacgcaaggcgcttttcatcgcttccgccccagcggtctgtgcgccggtttgttttcggtgaataaaattggtgaatcaggtacccgtttgccccgtgaatttcaacaccgtcaaagccggcttcaatcgctctgcgtgtcgcttcgccgaatgctttcacgatgtgctcaatttcttgttctgtgagagcacgggacgtttgtctgccgtcttcttctgagccgctcggactgacgacgtcgttgtttggcacgagttcaggagggcattccaagcctccgtggtgaatctgcacaacggctttcgctccttgagactggatcgcctgagcgagttttttcaagccgggaatgtgagaatcatcatagatgccgggctggcctggaaacgctttgccgtccggcgttacgtttgcacatgccgtaatgaccatgcccatttcttttgaacggggagtaatgtagcttaattcacggtcggaaatcgttccgtcatcatttgatgaatagtgtgtcatcggtgcgactgaaatacggtttggtatagtgacaccgctttcgaacgtaaaaggttcaaacagcggtttataagtttgcttcatcatttcgccttcttccttaggagtttaactcgtccgtattctagcttatgttttcattgtgtgcaattattttgcttgttcttcttcctgaggttatgaccggctgaaccatttaaacgaatgaaacggttttctccgttccttttcaggatctttatatcctcctgaaatttgatggccgatcgagctgaatatgacagcggcggcgaagaggagaatgatttttttcatatgcatatcttctttcttatcttttacatggttatttataagcatacgcttgtgcgaaaaaaccgtcaatttgtttattcttttttccactttcctgcggcgaatatcgttccgatctgaatcacaacacttaacagagcgcacactgccacaactgtgttgctgtccatagaagacaccctcctttttgttaggttgatgtatcatatgacggctgtctctgttttgacaaaaccgtaatgcggtgtttcatatttttcaacacaaaaagggcgcttttttaagcgcctttacttttttttcagccggttcaaagcgatttgaacggcgatggcgtcatccaggtagccgatcggaaacatgtaatccgggataacgtcggtcgctaaaatataatacagcagcgcgctcccgagaatcgcgcggtcttcagccggtgttgattcatccatatactgatgatgcatgtttttcaaatggtcaataaaagggccgacgctttcttcattgtccattttcttttgaaactcatcgcaaatcaggcgatggccctgctgggttttggcgtattgttcatatctggtcagttcacgctcaatttgctcccgggaaaaaggctgatcaaacatctcggccatattcagcatatcctgaatcgcgtgcatcgggtcttgcggcgcagcttctttttcatggccgatgtctatgcctgacgcctcaagcaattcctccagcggggtgcggaggtgttttgaaaattcctgaagatgctttaaattggccttctgtttgccgttgataatccgggagatagtggccgtatcaatgtttgttaaggcgccgagttttctcatggagagcgagtgcttatcaagcagtgattttaaaaggggtcccagtgtcttatttttattttctgtcaagggtgtcacctcgtttccgccggaatgatgatcgtcaatcaataatttttgcagaaaaggtaccttttctgtgctgctgaataggatagtgtagattcaacggcacaacatgttgaaaagacatcaaagaatggagagaaacgaacatggcttggttattgattttaggtttggcagtgtcctcaagcattgataatttaggagtggggatgtcatacggcatcagaaaaatcaaaatatcgcatgcgtcaaatatgatgatcgcttttatctgttttgtattcagttatatcggaatttatttcggcaaatggatttcagccgttttaccgggctttcttcctgtattgctggcggcgtttattttatctgtcatcggtatccgcatcattctgctggctgtgccgagaaaaacagcgcgtgttggcgggtcaggaaaaaaaggccgttttgccggtctgctgcaaaatccggaggcagcggatgccgacggttcgggagaaatcggtatattggaatccttggttctcggggtggccgtatccgcaaatgcgctgaccaacggattaagcgcggggttgatcgggctttctcccgctgccatttccattactgcggcggtcggaagctttctgaccatatggatcggctgctcgcttggaaaaaaagccgcttcattgcgcatcggttcttttcacgtcggacagttcagcacggtgctgagcggagtgattattctcatcattgccgccaatacgctgctcttttaagttgtcccgttcattttatgaaaagctcaaaataaatatgaatgtttctattcgggagagtgcatgacgcggctctcttttttgccgatctgatattttttcaaaatgaacagaaagtcgtccgtttccgttaaattctgcatattcggccttcagacagaacctttttcatagactgatcagcttgttttctttctaagttcaggtaaacagcaggtcagatagccttcattccaaagatggaaaaacgctggaggaatggaggctccctttacaaatcggccattctgttcaaagataaagccgaatgagaaaacgtgaggtgatctgtgtgaagtctgccatacttctgatcttcaccgcatggctgttatcaggctgcgagtataccgcggaggctgatgcggcgccgtcatttacacaggaaggaacatttataaaagcggccggaaacgatacgatcgcggtcgaaattgacggagaaaggcaagaggtgaaggtgcctttcgctaagcggtttgaatgtcagtcgctgcctgaacatacggcggtgcaaatcacctataaaaaagagagcaacggacaattacggcttgagaaactgaaaaaagaaacagatatgtgaaaacggggaggaaaaaaacgtgggtttactgacaaaaagcgctgctgccttcggtgccgctctgcttctgcttgcgccgtccgcttatgcagccgaacctttgcaagggaaaaccatctatatagatgccggacatggcggagaagacagcggggccggcggaaatggactgcttgagaaaaacatcaatttagcggtgtcaaacaaggtgatcgccaaattggagacagaaggcgcaaaacctgtagcttcaaggactgatgatacttttttacgtttggacgagcgggtggcgaaagcgagcgccagccaatccgatttattcgtcagcctccataccaattcagccgtatcaacggcatcgggcgcggaaacgtattttaattcgacatatgaaggagcggacagcgaaaggcttgcttccgacattcagcagcagcttgtcacgtctttagggatgagggacagaggcgtaaaagaagctcctttttatgttattacatattcaaagatgccgagtgtgctggctgaattaggttttatcacaaatcctcaagatgcggacaagctgaaaagcgataacggacaagagcacgccgcggacgccgttgtaaacggaatcgaaacctattacagcggacggtaatgataaaatatgtgtaaatagcgccctcctgatgtgcataacgattataatagagaaaaccgatgacaaacatctgaggtgacacatatgacgaatatttttgcccaccggggggcgtcgggcgactgccctgaaaatacgatgcccgcattcaaaaaagcgattgaggacggggctgacggaatcgaacttgatgtacagatgacaaaagacggccggatcgtggtcattcacgatgaaaccctcgaccgcacgacatctttgaaaggatttgtgaaagatacggcgtatgacaaaatcagaaccgccgatgccgccggaaaatggaaagattcttttaaaggtgtcagaattccgcttttgtccgatgtgctgcgttttgctgaacgtgctgattttctgataaacattgagctgaaaaacagtgtattccgttacgaaggaatggaagaagaagtgatcaaaaaagtcagatattacggactggaaaagcgcgttattttttcttcatttaatcatgagagtctcgcggtgtgccacgccctggcgcctgaaattgaacgggcggtgctgacaatggatgtgctgtaccggcctgaacgttatcttgccgccattcccgcttcgggttatcatccgaagctcggcacgccggcggtcagcgctgaagtgatcacacatcttgcaaaacaccaagcggcgctccgtccgttcaccgtcaatcgtcctgaggatatgaagcggctgatgaaagcggggatagacgcgatttttacagattatccaaagctggctgtttctataaaagaagaatgccgcagctgagaagactggtcagacagtcttctttttttatgggcgggaaaaaggcggtgcactcataactcggtcagccggttcatatattgtaacagggcgttttgtgtaagcgttatcttttatcttattgaaagtgaggcaaaattgtgggaaaaacggttatcgtcagtgcggcaagaacgccgttcggaaaattcggcggcgcattaaaagaggtgaaggcatccgagcttggcggcattgccataaaagaagcaatcaagcgcgccgctatcagtgaaagcgaagcggaaggagcggtgatggggatggtcgtccaggcgggtgccgggcaaattccggcacggcaggctgcaagatatgccgggcttccgtggtctgttccggctgaaaccattaataaagtctgtgcatcagggctcagagccgttaccatctgtgatcaaatgatccgggcgaaagacgcggacgtgctgattgcaggcggaatggaaagcatgagcaacattccgtacgccattccggccggccgctggggtgtgaggatgggggacggggtttttcaggatttaatggttcatgacgggctgacctgtgcgttcgaccaggtgcatatggctgtccacggaagcactgcggccaaaaagtacggcatttcccgagatgaacaggatcattacgctcttttgagtcagaaacgcgcggctgaggcggctgatgcgggcaaattgcgtgaagaaattgtccccgtcacctggaccggcaaaaagggcaaacagcatatcgttgaagcggatgaggggctgcgtcctgatacaagccttgagcagctcgcagcgctcaagccgattttcacagccgacggaacggttacagccggaaacgctcccggtgtaaatgacggggccggagcatttgtgctgatgtcagaggaaaaagcagcaaagcagcatgtcaggccgctcgcagcgatacttggctttgcgtccgtcggactggaagcgtccgagctggcaagcgcgccgggagaggccatcagccggctcttgaaaaaaaccggactgtccgttgacgatattgatttgtttgaagtaaatgaagcatttgcgtccgtcgtgctcgtgagtgaaaaaatagccgggttcagccgggagaaagtgaatgtaaacggaggggcaatcgcgttcggccacccgatcggcgcaagcggagcgagaatcgtcatgagtttaatatacgaattaaagcgtcgcggaggggggttaggcatagcggctatatgcagcggagcggctcaaggagatgccgtcctgctggaggtgtactgatcaaaggagggagcgccggatgaagatgaaaacaatcatggtcgcaggtgccggtcagatgggggcaggcatcgctcagacggctgcagaagccgggtttgccgtcaagttatacgattgggagccggaaacggtaacaaaaggtcttcaccgcataaagacaaacctggagaaagagcaggcaaaaggacggaagtcacagcaggagacagatgccgttttcagccgtatttccccggcggagctcacagaagcgggagatgctgattttatcattgaagccattgccgaaaacaaaaaagcaaaagcggaattgtttgacacacttgataaaatctgtccccctcatgccgtattggcaagcaatacgtcttctcttcctattacggagcttgccgcggccacaaaaaggcctgaaaaagtaatcggcatgcattttatgaatccggttccggtcatggagcttgtcgaagtcatcagaggactcgccacatcggaagaaacggcggaaacagtaaagaagcttgccgtccggatgaataaaacccctgtcgaagtcaatgacttcccgggctttatatctaatcgcatattaatgccgatgattaacgaagccgtttattgcctttacgaaggagcagcttcaaaggaagcgattgatgaggtgatgaagctcggcatgcgtcatccgatgggtcctttaacattagctgacttcatcgggctggatacgtgcctttccattatggaggttctctacgcggggctcggagatccgaaataccgcccatgccctctgctcagaaaatatgtcagcgccggctggctcggcaaaaaaagcgggcgcggtttttatgagtacggcagatgacgtaaagatcatgaggggagacggcagccatgcattttactgaagagcacatcatgatgaggaaaatggtgcgtgattttgcccgcaaggaaatcgcaccgatggttgagctcatggaatcaacagatgaatttccggagcggctgattaaaaaaatgggcgaagcgggattgatgggcattcccgtcccggaagcttacggcggggcgggtgctgatacaacatcttacattttagcgattcatgaaatatcaaaagtcagcgcggccgtcggcgtcattttgtccgtccacacatcggtagggacaatcccgattttgcatttcgggacagaagcccaaaaacaaacgtatattccgaagctggcagcgggcgaatatattggagcttttgcgcttactgagactcactccggatctgatgcgggaagcctgaaaacaacagccgtgcgaaaaggcggttcatatattctgaacggttcaaaaatctttattacaaacggcggagcggcagatctgtatctgacatttgccgtaaccgatccgggtaaagggagaaagggaatttcagcgtttattgttgaaaaaaacacacccggtttttctgtcggaaaaaaagaaaaaaagctcggattgttaggttccaatactgccgaattgcagtttgatcaagcggaaattccgattgaaaaccggctcggcgaagagggcgagggtttttcaatcgccatgaaaaaccttgacgtcggacggatcggcatagcggctcaggcgctcgggattatcgaagcggcgctcggctgctcggcggagtacgccaaaacccgcagccagttcggcagacccatcgcttcgaatcaggccgtttcatttaaattatctgacatggcaacgaatgcggaagctgccaaattattggtctatcatgcggctgatctgtatcagcgagggcttccgtgcggaaaagaagcatctatggcgaagcaattcgcgtccgatgcggcgatgaaagcggcggtggaggctgtgcagattcacggcggctacggctatatgaaagagtatcccgcggagcgtttatttcgggatgcgaaagtcacgcaaatctatgaaggaaccaatgagattcaaaggctgattatttctaagtatcttcttcaataaaaagtgcgcaaaggagcgaaactatggaatcttattctcccggtttagatggcgtcattgcggtggaaacggggatttctttcctggatacacagcagggcagtattttaatcaaaggccacgatctgattgagctttctaaaacggccggctatatggacattgttcatctcttattggaagacagacttcctgatgcgaaagagaagaaggcgcttgaagaagacgttcggcgcggcggacaccttcccgaggaaatcttgcgtatatgccgtctgctgcccgaacgtactcacccgatggacggactgaggacaggtttgtccgcgcttggaggctttgataaggatattgataaccgcacctcttctgtaaatcggcaccgtgtccgcgggctgataggcaaaatgcccaatctgaccgtcaacagctatcgagtcatcaacggactggagcctttagcgcctgtcggaaccttgtcgtacagcgcaaactttttatatatgattaccggaaaaacgccgtcctccttggaagaagaaatattcgaccggtcgcttcttttatacagtgagcatgaattgccgaactcaacgtttacggcccgtgtcattgcttcgacgcaatcggatatttacggcgctctgaccggagcagtcgcctcgcttaagggaaaccttcacggcggagcgaacgaagcagttatgtacatgcttgaggaagcgaaggatacagacgggtttacacaattattaactcaaaaactcgcaaacaaagaaaaaatcatgggcttcggccaccgtgtctacatgaaaaaaatggacccgagggcgctcatgatgaaagaagcgttgaaaaaactgtctgatctttcaggtgatttccgtctttatcatatgtgtgaagcaggagaaatcgtcatgcgggagaaaaaaggcctttacccgaacttagattactacgcagcgccggtctattacatgctcggcatcccgatcccgctgtatacgcctatattcttcagcgcacggacggtcgggctgtgcgcccacgtcattgaacagcacagccgaaaccggcttttccgcccgcgtgtccgctataccggagcgcgtctgtaaacagatgagaaaggaagatgaaaacatgacagaaccccgccgaatggacgccgtaatcgaagagatttctgactacgtgctccatcaggagattgacagttcggaagctttcactacggcaggacatgtgcttcttgatacgataggctgcggaattttggcgctcagctatcccgaatgtacaaagctgctcggcccgattgtcccgggaacctccgtgcccaacggcagcagagtcccgggcacgccttttgttttagacccggtcacggctgcctttaatatcggctgtatcaacaggtggctcgattataatgatacgtggcttgcggccgaatgggggcatccgtctgacaatctcggaggcatattggcttgtgcggattatatatccagagtgcggatttcagaagggaaagaaccgcttaccgtgcgtgatgtgctttgcgcaatgatcaaagcgcacgaaattcaaggaattctcgctttggaaaacagtttaaacagagtcgggcttgaccatgtgctgtttgtgaaggtggcgactgcggctgtttgcgcacaaatgctgggcggctcaagagaggaaatcaataacgccgtatctcacgcttggattgataattcaagcctcagaacgtatcgtcatgcgccgaacaccggatcacgcaaatcatgggcggccggcgacgcgacgagcagaggcgtatatttggcccttatggcgcaaaaaggtgagatggggtacccgacggctctgaccgcatccgggtggggatttcaagacgtattatttaaccggcaggaaatgaagcttgcccgcccgcttgggtcctatgtgatggagaatgttttgtttaaagtatcctatccggctgaattccacgcccagacagcggcggagtgcgcggtccggcttcatccggaggtgaaagaccgcatcgaagacattgacaggatcacgattatgacccatgagtcggcaatccggattatcgataaaaaagggccgcttcacaatccggctgaccgggatcactgcctccagtatattacggcaatcgggctgcttttcggagatatcacggcggatcattatgaagaggaaacggcgtctgacccgcgaattgatacattgcggagcaaaatggaggtgacggaacataaagcgtactcaaaagattacttagacccgaataagcgatccatctcaaatgccgtacaggtgcattttacagacggcacggctacgggacggattgaatgtgaatatccgctcgggcaccggttccgcagaaaagaagccgttccgaagattcttgccaagttttcagcaaacatcagcactcatttttcattgaagcagcagcggaaaatcgaagaggcctgtaaagatagcggccgaatgcagaagctcagcgttagtgaatttatggacttatttctcatataaaataggagggtgacaaacatgacgtggatcgtcagcaagcagtcgtctcaagaggagcttgcagagcggttccgtacgctgatggcagcgccggatctattgcagattccaggcgctcacgatgcgatggccgctcttattgccaagaaaacgggtttttcggctctttatttatcaggcgcggcttacacggcgagcagagggctgcccgatttaggcatcatcacgtcggcggaaatggctgaacgggttaaagatctggtccgctcgtctgatctgcccgtccttgtcgatattgacacgggtttcggaggcgtgctgaatgccgcccggacggcgaaagaaatgtatgaagcgcgcgcggccgccgtccaaatggaggatcagcgcctgccgaaaaaatgcggacatctgaatgggaagcagctcgtgccgattgaagaaatggcgcaaaaaatccaagcggtcaagcgggccgcgccgactcttcttgttgttgcgagaacagacgccagacagcaggaagggctggagggggcattaaaaagggcgtccgcttatataaaagcgggtgctgacgctgtttttccggaagcgctccaatacgaaagtgaattcagagcgttttccaaacaaatcagtgtgccgattctcgcaaatatgactgaattcggacaaacgccgtattacagtgctgatgaattttccgatatgggctgtcagatggtcatttacccggtcacgtcactcagaacggctgccaaggcttttgagcgtattttccgccttctgaaagaagaaggctctcaaaaagaggggctttcggatatgcagacgagaaaagaattatatgaaacgatcgcttacgatgactatgaagaactggatcaatccattgccaaaacgatactgccggacgactgaaaaagcccttttttgcaagggctttttttacagcttttttttcctgaaccgcgggctgacttgattgcgtttccgatctctgtacaaaataaacccggccagaacataaaggccgaacaaaaaaaacgccaatccggccgccccctgaagaaaaagggacggaaacggggaaaacgcatgcccgaataatgcatctctcatcagtttaatgccgagcgccgcgacagcgccggggaggaccagaatcaaaagcgcaacaagccggctcatattcagaaaacccctttacgatatgatttcctttattgtccaatcgaaaaaatattttgtcaagagatcaaaacgtggtaacataggggttgtgcaaattattgcaacgggaaatacaggtgtgcaaattttttcatataaaggggtatcgggatgcagaaggtgctgattataggtgctggtaaaggaggcacggcgctcctacagattttgatgaaaacaaaactgatccggattattgcggtggttgatcaagatccggaggcgcaagggctgcaagaagcccggagatatggaattgcaacctcatcagattggaaaccctacataactgaagatatagatattatcatccatacaacaggcgataaagcggtcatggatgagctgctccatgagaaaaaagaacaaaccatcgtcatgccgggaaaattggcgtacatggtgtttcagctgatggaggaaaaacagcagcttatccaaatgctgaagtcgcagacgtataagcatgaccggatttttaattcaacgcacgacggcatgatttttatagacgtcaacgaaacgatcattttatttaatcagatggcagaaaaaatggtcggccgaaaacgggaggatgtcatcggccgccaaattaaagatgtagtgccgaacacaaagctgccgcggattctggaaacgagagagccggaatataaccagaagcagcttctcggcaagcacctgcagattgtcacgacaagactgccgatcattgatgaaggcggaaaacttctcggcgcgttatgcgtgtttaaagacatcaccgacgcagttgaactggcggaagaggtcacgaacttaaaacaaatccgcaccatgcttgaagcgattattcaatcgtcagacgaggccatttccgtcgttgatgaaaacggcatcggaatgttaatcaacaaagcatatacaaaaatgaccgggctgtcagaaagcgaagtcatcggaaaacccgcttccaccgatatctcagaaggggaaagcatgcacctgaaagtattggggacaaggcggcccgtgcggggtgtgaggatgaaggtcggccccaataaaaaggatgtcatcgtaaatgttgcccccgttattgtggatggtattttaaaaggcagcgtcggcgtcatccacgacgtgtcagaaattaaaacgctgactgctgagctgaatcgggcgcgccagatcatccgcacgcttgaagcgaaatacacgtttgatgacattatcggcacgagtgaacaaatgctggttgcccttgaacaggcgaagctcggggcgaaaacgccggcgacgattctgctgcggggagaatccggcacagggaaagaacttttcgcccacgccatccataatgaaagcgaccgaaaatacaataaattcattcgggtcaattgtgcggccctgtctgaatccctgcttgaatccgagcttttcggctatgaggaaggcgcgtttacgggcgcgaggcgcgggggcaaaaaaggactttttgaggaagcgaataacggcagcattttcttagatgaaatcggagagctgacccaaagcacccaggcaaagctgctcagagttctgcaggaaaaagaaattatcagagtcggcggcgcaaaagcgatttctgtcaatgtcagaattatcgcagcgacaaacgtcaacatcgaaaaggccatggcggaaggcgcgttccgcgaagacctgtattaccggattaaccgctatccgatctcaatcccgccgcttcggcagcgcaaagaagatattgaagcgctgagcattcggctcattgaaaaaatcaatcaggattacggccgcaatgtaaaggggctcacgccgaacgcgctgcgagctttatcagcctacagctggccgggaaacgtacgggagcttgaaaatgttctcggacgggcaatgatatttttagagccgcatatggaacggatcgaacagcagcatctgcctgttttcgaatcagagctgaatgacaaaaacggcacccaaagtgattttccggatgtagaaggggaaaagctgtctcaggctgttgaaaaatttgaagcgcacatcattcaaaaaacgcttgaaaagcataaattcaaccgaaccaaaacggcgaaagcgcttggtgtcagcattcggaatctgtactacaaaatggacaagtacggccttgcaaatgacggcatgcaataaattgcagagaaagcgcaaaccgctgcatgttttcttgaaaaaagccggaataaaccctttcgcatatttggcacagaacttgcattgttaaaagcggattcgcacaagaaaggtggtacaaaatgaagctgagagacctagttgaaaaagccgcggcaaaaaacgcaaaaaccattgcagtggcccacgcagcagataaagaagtgatccacgccgtcaaaatggcggcagaacacttgtcggcacgatttttactgacgggtgacagcggaaagctgaaagagcttctggcaaatgagccgaagttcaatgctgacatcatccacgccgattcaccagaagaatctgcggcaaaagcagtgcgcgcagtgcgtgaacaagaggcggacgttttaatgaaagggaatctcccgagctcaactcttctgaaatcggttttaaaccgccaggaagggcttcgttcaaaaagggtgttatcacatgtagccgtttttgaagtgccggactatgaccggctgatgtatgtgactgattcagcgctgaacattgccccgtctcttgaagagctcgggcatattctgcaaaatgcggttcatgtcgcacattcagtagggaaccctatgccgaaagccgcagtccttgcggctattgaaacggttaatccgaaaatggaggcgacgctgaacgcggctgcgatcgtccagatgtgcaatagaggacagattaccggctgcattgcggacggaccgcttgctttggataatgccgtatcccaagcggctgcgctgcaaaaagggatttccggaagcgtagcgggccaggcggatattctcttggttccttcaatcgaggccggaaatatgctttataagtcaatgatttattttgcgaaagcaaatgttgctgctgtcatcgccggtgcaaaagcgccgattgcattaacgagcagagcggataccgcagaaaataaactgtattcaattgcgcttgcgatttgcgcatcacaagaacagtaggaggaacgaacctatggaaatttttaaatatatggagacttatgattacgaacaattggtattctgccaagatgaacaatccggattaaaagcgatcatcgcgattcatgatacgacgctcggccctgcactcggcggaacaagaatgtggacatatgacagtgaggaagcggcgattgaagatgcactgagactcgcaaaaggcatgacttataaaaatgcggctgccggtttaaacttaggcggcgggaaaaccgttattatcggagacccgcgcaaagataaaaatgaagaaatgttccgcgcgttcggccgctacatccaaggcttaaacggaaggtatattacggcggaagacgtcggcaccaccgttgaagatatggacatcattcatgatgaaacagactatgtaaccggaatttctccggcattcggttcatcaggaaatccgtctccggttacggcgtacggcgtctacaaagggatgaaagccgcagcgaaagcggcgtttggcactgattcactggaaggtaaaacaattgccgtgcaaggcgtgggaaatgtggcttacaatctatgccgccaccttcacgaagaaggcgcttctttaatcgtaaccgatatcaataaagaatctgttaaacgtgccgttgaggacttcggcgcccgcgccgttgatcccggcgacatttactcacaggcgtgcgatatttatgccccgtgtgctctcggcgccgtcattaacgatgacacgattaaacagctgaaggcgaaagtcattgcgggggcggccaataaccagctgaaagaaacacgtcacggcgataccattcatgaaatgggaatcgtgtacgctccggattatgtcatcaatgcaggcggcgtcatcaatgtggccgatgagctttacggctacaacgctgagcgtgctttgaaaaaggttgagggcatctatgcaaacattgagcgggtgctcgatatttccgcgcgtgacggcattccgacatacttagcggccgaccgtctggctgaggaacgaattgagcgcatgcgccgttcaagaagccagtttctgcaaaacggccaaagtatattaagcagacgataggaatttgatctggaggtatgaaaatgttcgaacaggaaaaacgcattctcattctgaatccaggctcaacatcaacgaaaatcggtgtctttcacaatgaacgctgtatctttgaaaagacgctgcggcatcccgaagaagagctgaaagcatttaacggcattatcgaccaatacgaatttcgaaaaataagcattcttgagtctttgcacgaacagggcatcaacatttcaaagtttgatgccgtttgtgccaggggcggcctgctcagaccgattgagggcggcacatatgaagtgaatgacgccatgatcactgatttgaaaaacggctacaacggccagcatgcttctaatctgggcggaattattgccagggaaatagcagacggattaaatatccccgcgtatatcgtcgatccggtcgtggtggatgagatgactccgctcgctaaagtatcaggaatgcctgaaatcaagcggaaaagcatttttcatgctttgaaccaaaaagctgttgcccgtcatgcggcggcgtccctcggcaaacggtatgaacagatgaagatgatcgtcactcatatgggcggcggcatcacagtcggggtccatgattgcggacgggtgacggatgtcaacaacgggcttcacggagaagggcccttcagcccggagcgtgcgggaaccgttcctgcgggtgatttggtggagatgtgtttttccggcaagtattcaaaagccgatatgatgaaaaaacttgtcggcacgggcggactctccggctacctggggacaactgacgcggtgaaggtggaaaaacgcattcaggccggagatgagcatgcgaggctcatttatgacgccatggcttatcaagtagcaaaagaaatcggggcggcaagcgccgtattaaaaggaaaagtagacattatcgtcctgacgggcggattggcgtacgggaaaagtttcgtatccgccatcagatcgtacatagattggatttcggatgtactggtgtacccgggagaaaatgaactgcaatctctcgcgcaaggcgcgcttcgggttttagccggcgaggagcagtcaaagcaatatcagatcggcgaaggagtgaaaacaaatggcgactgaatatgatgtggtcattctgggcggcggcacgggcggttatgtagccgccatcagagcggcccagctcggcttaaaaacggccgttgtagaaaaagaaaagctcggcggaacatgcctgcataaaggatgtatcccgagtaaagcgctgttaagaagcgcggaagtgtaccgaaccgcaaaggaagcggcagcattcggcattgaaacggaaggtgtctccctccgctttgacagcgtgcaaaaacgaaagcagggaatcgttgaccggctggccggcggtgtcgcccacttgatgaaaaaggggaagattgatgtattcaacgggtacggacgtatgctcggcccttccatcttctcacctcttcccggtacggtttccgtcgaatacgcaaatggtgaagaaaacgacatgctgataccgaaacaattgattatcgcaaccggttcaaggccgaaaatgctgccgggtttagaagcagacggtacatatattctgacatcagatgaagcgcttgagcttgagcgtctgccccaatccatgttgatcgtcggcggcggtgtcatcggaattgaatgggcatccatgctgaacgatttcggcgtcaatatcactgtgattgaatatgcggaccgcattttgccgactgaagaccatgatatttcaagcgagatggaaaaactgttaacgaaaaaaggaattaagattgtaacgggtgcgaaagtgcttccggatacattggaaaaagcggatggcgtttcaattgccgctgaaaagaatggaaaaaaagaaacgtatcacgccgaacaaatgcttgtttccatcggccgccagccgaacattgaagggatcggtcttgaaaacacggacattgcagcggaaaacggttctatcatagtaaatgaagccggacagacgaaggaatcgcatatttatgcgatcggtgatgtcgtcggcggtctgcagcttgcgcatgtggcctcccgtgaaggcatcattgccgttgagcatatggcgggtcttaatccggctccgcttgatgccgctcttgtgccgaaatgcatttattcaaatccggaagcggcgagtgtcggtctgacagaagaagaagctgcccgaaaaggacatgaacttaagatcggaaagtttccgttcatggcaatcggaaaggctcttgtatacggagaaagcgatggctttgtcaaaatcgtcgccgaccggaatacagatgatattctcggtgttcatatgatcggcccgcacgtcaccgatatgatctctgaagcggggcttgccaaggtgctcgacgcgacgccttgggaaatcggccagtccatacatccgcatccgtcgctttcagaagcgattggggaagctgcgttagccgcagacggaaacgcgattcatttttaaaaggaaagaaggaggggtttgaatgactacaaaccgccatcaagcattagggctttctgacgaagaagccgttgaaatgtatagaaccatgctgttagccagaaaaatcgacgaaagaatgtggctcttaaaccgctcgggcaaaattccgttcgttatttcatgtcaagggcaggaagcggctcaagtaggcgcggcctatgccctaaaccgcgataccgactatgtgcttccgtactacagagatatgggggttgtgcttgcattcggtatgactgctaaggatttgatgatgtcgggttttgcgaaagcggctgatccgaactcaggcggaaggcagatgccgggccacttcgggcaaaaggaaaacagaatcgtaacgggctcatcccctgtgacgacgcaggttccccacgcggtcggaatcgcgcttgcgggacgcatggataaaaaggatatcgtctctttcgttacctttggagaaggttcttccaaccagggagattttcacgaaggggcaaactttgccgccgtgtataaattgccggtcattttcatgtgtgaaaataataagtatgccatttccgttccgtatgacaaacaggtggcgtgcgaaaatatttccgaccgggcggcaggctacggcatgccgggagtcacagttgacggaaacgacctgctggaagtttaccgggccgtgaaagaagcgcgcgaacgggcatctaaaggcgaaggtcctacattaatagaaacggtttcctaccggttgacgccgcattccagtgatgacgacgacagcagctacagagaacgcgaagaagtagaagaagcaaagaaacaggatccgcttcttttatacaaagcatacttgcaagaagccgggcttctaggtgaagaagaagaaaaggccatgctggatgacatcatggctatcgtaaacgaagcgacagacgaagcggagaaagcgccatacgcatctcctgaatcaacgcttgatcacgtttatgcgaagtagggaggaatacttatgtctgtaatgtcttatattgacagtattaatgcagctatgaaagaagaaatggaaagagatccgcgcgtttttgtcctcggggaagacgtcgggagaaaaggcggcgtatttaaagccacggcgggtctctatgaacagttcggagaagagcgggtgatggatacgccgcttgcggaatcagcgattgcgggtgtcggaatcggcgccgcgatgtacggcatgcgcccgattgccgagatgcagtttgccgatttcattctgcctgcggtcaaccaaatcatttcagaagcggccaaaatacgctaccgttcaaacaatgattggagctgtccgatggtcatcagagcgccttacgggggcggcgtgcacggcgcgttgtatcattcccaatctgtggaggccatttttgccaaccagccgggtcttaaaattgtcatgccttcaactccttatgacgcaaaagggctgttgaaagccgcagtccgtgacgaagatcccgtgctgtttttcgaacataagagggcgtaccgcctgattaaaggagaagtccctgctgatgattacgtccttccgatcggaaaggcggatgtaaaacgcgaaggcagcgacattactgtcattacgtacggattatgcgtccatttcgctctgcaggctgccgagcgtcttgaaaaagacggaatttccgcgcacgtattagacttgcgtacggtttatccgttagataaagaggctatcattgaagccgcgtctaaaacgggaaaagtattgctgatcacagaagatacgaaagaaggcggtattatgagcgaggtcgccgccattatttctgaaaactgcttatttgatttagacgcgccgatcaagcggcttgcaggccctgatgttccggcaatgccttatgcgccgacaatggaaaaatacttcatgatgaatcctgacaaagcggaagccgcgatgagagaattagcggagttttaaagacgtaaggaggtttttgacatggcgattgaacaaatggctatgcctcagctcggagagagcgtgacggaagggacgatcagcaaatggctggtatcccccggtgatcaagtgaataaatatgaccccatcgcggaggtcatgacggataaagtgaatgcggaggtgccgtcttcttttaccggtacgattacagaacttgtaggagaagaaggccagactcttacagtcggcgagatcatctgcaaaattgaaacggaagaaacggaaaccgaagaggcgccgaagcgggaagaagagcagaataccccttcagacaccgatgcaaaccgtcaaggtaaagaccagtcaaataaagcgcgttattcgccggccgtgctcagattagcgggagaacacggcattcagcttgaagaagttgaaggaacgggcgcaggaggaagaattacgcgaaaagacattcaaaagatcattgattcgggaatgcagcagaagtcggaagcaccggcgccggctgccgttcaaacaacgcaacaagcgccgaaacaacagcaaaaacaagcgccggcgccagttctgtcagccggtgatattgaaattccggttacaggcgtcagaaaagccatcgccgccaatatgcataaaagcaaaacagaaattccgcacgcctggacgatgatggaagtcgacgtcacgaacatgacggcgtacagaaacagcataaaagactcatttaaacaaaaagaaggcttcaatttaacatttttcgctttctttgtaaaagcggcggcgcaggctctcaaagagttcccgcagatgaacagcatgtgggcgggagacaaaatcgtccaaaagaaagacatcaacatctccattgccgttgccacggaagattcgctgtttgttccggttattaagcatgctgatgaaaaaacgattaaaggcatagccagagaaataacggaccttgcgaaaaaagtgagaaacggaaaacttaccgcggaagatatgcagggcggcacatttaccgtcaataacacgggatctttcgggtcagttcaatctatgggcattatcaaccatccgcaggcggcgattcttcaggtagaatctatcgtcaaacgtccggttgtcatgaataacgggatgatcgcagtgcgtgatatggttaatctttgcctgtctttagatcacagagtgctcgacgggctcgtatgcggccgtttcctcggacgcgtcaaagaaatcttagaaaacattgacgaaaatacttcagtctattaaaaaaactccttttgcccgggcggcaaaaggagtttttttattttcattgtgaatcctcgggaacaagcatagtgagatgatgttttttcacttcgatcgtacaaggcgttgttccgtatacctcgccatctgtatccgcgtccatttcacgtccggtttcgatttcaatcctggaggcctgaatataggacagctcccctttgaaatcatcaaacgaaccctgctccatcgtcatcagctcccgcaacgcggcaaggcttgtgttgcggcagattaacacatcggctaagccgtcccggaggctcgcatcaggcaggggaactctgtttgtcccgatataatgcccgttcatgacaagcaccattacggcttcgtcttctttcacctcgccgtcaattgtcaatttgacaggaaacgggttcgcacttgtcatcgtccgcaaggcgctcgtgaagtagctgattttaccaagccatgctttttcagtttcattgatatggctcgatgcttcggtgatcaatccgatgccccagaagttcagaaaatagccgtcatccgttttacagacgtcaatcatccgtttatgtccggccgcgagcgcttcagcggccttttgaaggttttgcgggatgccgagcgcccgtgagaaatcgttgcacgttcctcccggcaaaatgccgacagcgggcctgttatcaagcttgctgatgctgttgatgcattgatgcacagtgccgtctccgcctaaaatatataaatggtcaactgaactgtcgaggttttcacaatactgacgggcatcgtcctgatgtttggtcggtttaatcaaaagttcgtcagctgactgggccaaaatggggacgaccgtgccgagcgttttatcaatctgtttttgaccggcgtttccgttataaattaatactgctttccgttggctcatacgactgctcctttatttcagacaatctctttaacaagtttcccgtttttaaaaggtcataaacttacatcaggtacataaaaggaacaaaaaacaatttggatatgagcggtgtcatttgccgatagtgaggttccttgctatcataagaaaagatgatcaaaaaggagaggtcccagttgaatatggattttaatttatttatgaatgatgtcgtgcgtcaagcccgccaggaaatcacggccgccgggtatacagagctgaaaaccgctgaggaagtggacgaagcgctttcgaaaaaaggaaccacactcgtcatggtcaactctgtgtgcggatgcgcaggcggtattgcacggcctgccgcataccattctgtacattacgataaacgcccggatcagcttgtgacggtatttgccggacaggataaagaagcgacagccaaagcgagagaatactttgaaggctatccgccgtcctctccgtcatttgccattttaaaagacgggaaaatcatgaaaatggtggaacgccatgaaattgaaggccatgagccgatggccgtcgtcacaaaactgcaggaagcatttgaagaatattgtgaagaagtataagtgaaagaaaaaccccggagccgagcgcttccggggttttttatatggaatctgtataaatataaatatttatacaccggcgttcagctgtcactaatcggaaaaacaatgactataataaacagagaaaggaaaatatatttttcaaaaatagtattgcatcacaattaaaaagtgtttaaaatacaagttaacgaataaatattcaattttaagagatcagtagatatgggggaaatgaatcatgaagaaatggctgttggtattagctgccgcatgtatcacctttgcgctgtccgcctgcggatcaggcaattcaggctcagagggcggaaagaataagctgattatgggtacatcggctgactataaaccatttgaatataaagacggcgatcagatcaccgggtttgacgttgatctggcaaaagctctgggcaaaaagaccggctatgacgttgaggtgcaggacatggacttcaacagcctgattacagccttgaagtccaagcaggtagatatgattttatctggaatgacacctacgccggaacggaaaaagcaagttgatttttctgatatttattatactgctaacaatatgattgttacgaaaaagggaagcagcattaaatccctgaatgatctgaaaggcaaaaccgtcggtgttcagctcggctccattcaagaggaaaaaggcaagaagctcgcttcgaaatacggttttcagctcgaagaccgcaaccggatctcagacttaacggaagagattaaatccgggcgttttgatgccgcgattatcgaagacatcgtagcacaaggctatttcagttcaaataacgatctgcagggctttgcgtcagcagatgcgaaatcagacgaatcgggctccgcgattgcgttccgcaaagacagtgatctgacagcgaagtttaacaaagcgctgaaagaaatggagaaaaacggagaaatcgaaaaactgaagaaaaaatggttcaccaacgagaaataaaaggaagctcaacttttcgttgagctttttatcttgaataaagacaaaggagatcacacgtatgaatttggatttctcagcgacaatcccccaaattccttttatattggaaggccttgcggtcacattaaaaattgtgctcgtttcagcggtcatcggtcttgtattaggaatcgtgctcagcttatttaaaatcagcacgatcagtccgctgaaatggattgcggatttttatacttcgatattccgcggcacgccgcttgtgctgcagctgatgatcatctatttcggtatgccgcagcttctcggctttcagatcgatcaattttgggcggcggtcaccgcattatcgctcaattcagccgcttacgtctctgaaattatcagagcgggaatcaacgcaattgacaaaggacaaaaagaggctgccgtcgctctcggcgtgccgtacggaaaaatgatgaaagatctgctgctgccgcaggcgtttaaaaacatttctccggctattattaacgaattaatcaccttgacgaaagaatcggcaatcgtcacggtaatcggtctcggcgatattatgagacgggcctaccagtccggcgccgcaacatacaactatttagaacctcttattgtggcgggcttaatctattacgtgctcgttttgatcttagcattcatcggaaaaggcgtagaaaggaagctgaaagccaatgattaaggtcgacaacctgtcaaaatcattcgggaaacatgaagtactgaaaaacatttcaacacagatcgaagaaggggaagtcgtcgccgtcatcggcccttccggttccggcaaatcaacgtttctgcgctgcttaaatctgctggaaaccccgagcggcggaacgattgccattaaagaaaacgaaatcaccgcagctaaaacgaataaactgaaagtgcgggaaaatatcggcatggtatttcagcattttcatctgtttcctcataaaacggtgcttgaaaatatcacatacgcgccggtcagcgtgaagaaagagtctaaaaaggatgcggaggaaaaggcgtgcgctctccttgaaaaagtcgggctgcttgacaaacggaacgactatccgaaccgtttgtcaggcggacagaagcagcgggtcgccatcgcgcgggcgcttgccatgaatcctgacatcatgctgtttgatgaaccgacctcggctcttgacccggaaatggtcaaagaagttcttgaggtgatgaaagagctcgcgcagacgggcatgacaatggtgatcgtaacgcacgaaatgggatttgccaaagaagtcgcagaccgcgtattatttatggatgaagggacgatcgtggaagacggtcagccggaagaattttttctttctccgaagtcaaaaagagcacaggactttttagaaaaaatattataaaatataactgtaagaaaagaagaagaatgctcttcttcttttttttgagaaagaaacaaacagaatggagcaagcaatgtttaaaatcggttaccggacactaaagaccgcacttggaacggcgctggccatttatttagcccagctgttgcatctgcaaaacttcgcatccgcaggaatcatcaccatattgtgcatccagattacacaaaagcggtcgcttcaggcctcgtgggcccgatttgccgcctgtttattggcgatcgtcttttcatatgtctttttcggactgatcggctattatccgtttgcgatcggaatattgctggtgctgttcattccgactacagtcgttttaaaaataaatgaagggatcgtcaccagctcagtaatcattcttcatttatatatgtccggcggcattacgatggcgtttatctggaatgagttccagctgatcaccgtaggtatcggcgtcgcgctgttaatgaatctgtatatgccgagcctcgacagaaaactcgcagcgtacaggaaaaaaatcgaggacaacttttccgtcatcttcgccgaaatcgaacggtatttgttaactggtgagcaagattggacagggaaggaaataccggagacgcatcagatgattcaagaggcgaaaaacctcgcctatcgggacgtgcagaatcatattttgcgccatgaaaatctctactatcattattttaagatgaggcagaaacaatttgaaatcattgaacggctgctgccgaagattacctctatttcaataacggtggagcagggaaaaataatcgcccatttcatccatgaattaagggaagccattcatcccggcaataccgctcataaatttttaaaaagacttgcagaaatgagaacggaatttgaagaaatgccgctcccggcaacgcgtgaggagtttgaagcgcgggcggctttgttccacctcctcggtgagatggaacaatatctcgtgattaaaagttatttcaaaggcatcaagctgtaaaaaacatatggatcaatcgcatgagtcctcctttcattggtcattctaatgaaaaaaggaggggagcccatgcgattttttttattgtcagccgtcctgctgctgtctccgctttggccgcttggcgcgaaccctttgccgggtgacccttatattatcgtcaataaagccacaaatgcgcttgctgttgtaaaggataaccgaatagaaggcatttatcaggtggcgacgggaaaaacggatgatttgacgcctgaaggagaatttacggtaacggtcaaagccgtcaatccgtattaccggaagaaaaatgtagagggaggcgcgccggaaaacccgctcggcgtccgctggatcggttttgatgcgaaaggcaccgacggcagaatatacggcattcacggaacaaacagagaagagctgatcggggggtttgtatcaaacggctgcatccgtatgaaaaaccgggatgtcatccgtattttccggattatccctcccggaacgaaagtattgattacaaaagaaaaccgctcattcgaggacattgcaatagagcggaaagccctcataaaaaagcaggaaacccccttgcaatgaggcgcctgcttttttactgcaaatacatcataatgcctgagaggagggttgaaagtataaatacgcccaaaatgacgatgacggcgcttttcataaatttttgagacattgtttcactccttaagattactgtctaccattttaacgtgttttgcttatatgaacaagccatatcctatgggggaaagcaggtggccgcgctatgaaaaaacttgatcatgtcggcattgccgtcagctctattgaagccgcgagaggattttacgaacggatgctcgggcttacgtatatgggagacgagctggtaaacggccaaaatgtgagagttgcttttttagaagcgggaggcacaaagcttgagctgattgagccgctgtcggacgcgtctcccgtcagctcttttttacagaaaagaggcgaagggctgcatcatttggcattccgctgcgccgatatgaaggaaacgatcaaggagcttgaatcatgccgcatgaccttgcttcatcatgaaccgcaaaacggagcgggcgggaagaagatcgcatttctctctccaaaagaggcgaacggcgtcctgattgagctttgtgaaacaattgaaaaaggagaaactcaagatgaacatgagtgatcatatcagacacttaaacgaaagacgttcctttttaacaaacggcggcggagcggaaaaaaataaaaaacagcacaaaaaaggcaagctgacggcaagagaaagaattgactatctattggacgaagacagtttttcagagctgcagccgtttgccaaaagccgcacgcccgggtgccagaatgctccgggagacggcgttgttaccggatacggcacaattgacggacggcccgtgtatttgtttgcccatgactttaccgtactcggcgggacgctcggcgagacgcatgcggaaaaaatcgcggcggtaatggatctggcggcgaaaaacaaaaacccgatcatcgggctgaacgactcaggtggtgcgagaattcaagagggtgtggtatcattaaatggatacggtcatatctttaggcgcaacgtcctttactcgggagtgattccgcaaatttctgtcattcttgggccgtgtgccggcggtgctgtttattcacccgctttgacggattttgtgattatggcggaacatacgtcgcacatgtttattacaggtccgaaagtcattgaacaggtgacgggtgaacagattgacgcggaaagtttaggcggtgcgggaatacataatgtgataagcggaaatgcccactattccgcacgaacggaaaaagaggcactttcggctgtgaaaaccctgctttcttatctcccgcacggcggacagacggcactacccgttaaaaaggaagacgccagaccgttattaaacaccctcgttcccgcggacagttcgaaaccttacgatgtgttacaggtaataaaagagctggcggatgacggaacgttttttgacattcagccgtattttgccaaaaacattgctgtcggttttctgaaactcggacggcgtacagtcggtgttgtcgcaaaccagccgaaacacttggcggggagcctcacgattgatgccgctgacaaagcgtcgagattcatccgtttttgcgacgcgtttcatattccgctattgacgatcgctgatgttccgggatttcttccgggccttcagcaggaacatgcgggaatcatccgtcacggagcaaaattgctgtatgcttttgccgaagcggcggtgccgaaagtgacgctcatcatcagaaaagcttacggaggcgcttatgtcgccatgaattcgaaagggctcggagcagatcttgtattcgcctggcccaatgcggaaatcgccgtgatgggagcggaaggcgcggcgtcgattttatacagcagagacatacaggcttctggggacccggagaaaacgaagcgcgaaaaaaaagccatatacgaaaaggaaaacgccggtccgtataaagcggctgcctgcggtatggtggatgatatcatccggccggaagactcgaggaaaaaattgattcaggcatttgacatgcttgcgcataaggaagaggaaagaccgaaaaaaaagcacggtaatataccgctttaaacggagggaactgaaaatggtaaacgaaaaacgtctgcttgaagaatttcttgaactcgttcaaattgattcagagacaaaacatgaagcggaaatcagcaaggtgctcaaacaaaaattcactgatttaggattgagcgtaaaagaagatgatacaaaagaagtgacggggcatggagccggcaacttaatctgtacgttaaagggcacaaaagatgcggatacgatttattttacatcccacatggacacggttgttccgggcaaaggcgttaagccgattgtggaagacggctatgtaaaatccgacggcacgacgattctcggcgctgatgataagacgggccttgccgcaatgtttgaagccattaaagtgctgaaagaacaaaacatcgagcacggcaccattgaattcattatcacggccggagaagaatcgggattagtcggggcaaaagcaatggatcgttcagacattaccgcgaaatacggttttgcgcttgattcagacggaaaagtcggcaacattattgtagccgcgccgacacaagcgaaagtgagagcaaccattttcgggaaaacggctcatgcgggtgtagaaccggaaaaaggcatctccgcgattacaatcgcatcaaaagcaatctctaaaatgccgctcggccgtattgataaagaaacaacggctaatatcggccgtttcgaaggcggcacgcaaaccaatatcgtctgcgaccaggttgatattctggctgaagcgcgttcattagtgcctgaaaaaatggaagcgcaagtgcagaaaatgaaagaagctttcgaatctgctgcagctgagatgggaggccgcgcggaagtggacatcgcggtcatgtatccgggtttcaaatatcaggacggcgatcaggttgtggaagtcgcgaaaaaagcggcggcaaaaatcggccgtccgagcgaacttcagacaagcggcggcggaagtgacgcaaacgtcattgccggccacggcattccgacagtcaacctgtcagtaggctatgaacaaatccatacgaaaaatgaaaaaatgccgattgaagagctcgtcaaaacggcagaaatggtcgttgccattatcgaaacagcggccaactaaaaacgaagcacccagttgattgggtgcttttttcattcttcatgatattaggcttaaagctttgcagatacaagaaaaaaccctgccggataggttccggcagggtttcagtattatgatttggcgggctccgcctgagccgcagcctgtttctttttatgatgcgtctgctgtaaaagtacgttctgcactgtcaaaaacagtccgcttgtaaaccagtaaagcggcagcgcagccggtacgttaagcgaaaaaacggtcatcatgacagggaaaataaagaccatgatttttgctgactgcatcgcggccggattttgagcagccggtgaatatttctcgtttaatttttgggaaatataagcctgtaagaaatacatggcccccgcgcacagtgatacaagaatatcagaatgccctaagctgaaccacagaaatgagtgtgaagcaatttccggcgttgagcggatggcgtaataaaaaccgatcaaaatcgggaattgcaccagcatcggaagacatcccattgccatcggattcagattgtgctcacggtaaagcttcatcatttccatttgcagttctttttgtttttccgcatctttcgtttgtttcattttagcctgaatgctgtcgacctgcggtttgatcacagccattttttcctggaacacccgctgtttcttaaattggttcacaaacaaaggcaatacaacgatccggacgataatcgtcaccagaataatcgacagtccgtactcaccgtggaacaggcccgccaccccttttaaaagtgccgaaaacggctcgatcaggtaatcgtggaaaaaaccgatattcccgaggcctcccgtctgagtctgagatgtcgccgcaaaagccgagcggcctgtgcacagtacgataaaaaataatcccaatacgatccacttttgatatgttttagacaattatgtttcctcctttatatcttcacttgccgttataaaaggaggaagctgacatcttcatcatcattcgccggtgaattcatgcggatgactttacgtatccaagttgtaatgcgatgatatataataataagaaagtctgttcggttcagctgaacgactgcttgatgttcatctattcgtttcgttctccaatgctcgcctgcgcggcgctcacgcaaaagaaaagcgatgccgatcgcggtcagagcgggaagaataattgtgaaaaaatcgactaaaaataaaaagtcattcattgactcaagaatcattttatcacatccattcagctcttattttactacatatatataaggttgtctatgaaaggaaaggaggcgccgggagtggccggaaaagggagaattatatttcatatcgatatgaacagtttttatgcctccgtagaaatggcgtatgatccgtctttaagaggaaaacctatcgccgttgccggaaacgtgaaggaacggaaaggaatcatcgtcacctgcagctacgaagcgagagcgcggggcgtaaagaccaccatgccggtgtggcgggcaaaacgcctctgtccggaactcatcgtcgtgcctccgaattttgaccgctatcggagttcgtcaaaagaaatgttcagcattctgagggagtatacggatttagtcgagcctgtttctattgatgaaggatacatggatattacggacacaccgcacagacacagggcgtatgagacagccgcagacattcaggcgagactgcaaaaagagcttttgctcccgtcaagcatcggcatcgccccgaataaatttctcgctaaaatggcgtctgacatgaaaaaaccgctcggcatcaccattttaagaaaaagagagctgccggacgtcttatggcctcttccgatagaagagatgcacggtataggaacgaaaactgcggaaaaaataaaaacgctcggcatcaaaacgatcggtgatttggcaaaaggagatgaacatgcgctgaaaacgcttctcggcataaacggcccgaggctgaaggataaagcgaacggcatccatcctgcagaagtcaatcccgagcggatttatgaatttaaaagcgtcggcaactcatccaccctgtcgcatgattcggctgactgggatgaattaacgggcgtgtttgaccggcttgcgctgtctgtgagcgaacggctccagcgtaaggaggtcatggcctgccggctgttcatcatgattcggtatgcggattggaaaacggtcacaagaagcatgaccctcagcaatccggctgatcagaaaaaagacatcatggaagcggcgatggaactgtttgacaagcactggaaccaaaacccggtaaggcttctcggcatcaccgggacggaactggttgaaaaacagcaggcgtataaacagcttgatctgttttcattcaaggaggacgcaaaggatgagccgatttttcagatgatgaacgagctgaatgaaaagtacggccaaaacctgatcagaaaaggcgccgttataaaaaaagaagaaagcaaaacaaggggcacgagctttaacagagacttttttcaggatgaaaagaaaaggtgaataacttgaaaaaaggggttatgtatgataatttctttagtataaatatcattttattttaatttaaattttaaaatggttaaacgtttgaagaagggacgttagaatatgtcaaaacaacaaatcggagttatcggtcttgcggtaatgggtaaaaatctggctcttaacatcgaaagccggggattttctgtgtctgtatacaacagatcaagcagcaaaacggaagagtttttagaagaggcaaaaggtaaaaatgttgtcggtacatacagcattgaggagtttgtccagtctcttgaaacaccccgtaaaattttattaatggttaaagcgggaactgcaacggatgcgacgattcaatctcttcttcctcatctggaaaaagacgatattttgattgacggcggaaatacatactataaagatacacagcgccggaacaaagagcttgccgaaagcggcattcactttatcggaacgggtgtatcaggcggtgaagagggagcgctgaaagggccttctattatgccgggcggccaaaaggaagcgcacgaactcgtaaaaccgattttagaagccatttctgctaaagtggacggggaagcttgtacgacatacatcggcccggacggagcgggacactatgtgaaaatggtgcacaacggtatcgaatacggtgatatgcagctgatctctgagtcatatttcattttgaaacaggtgctcggattgtctgccgaagagcttcacgaagtattcgctgagtggaacaaaggagagcttgacagctatctgatcgaaatcacggctgatattttcactaaaaaagatgaagaaacgggcaaaccgctagttgacgtcatccttgataaagcaggccaaaaaggaacgggtaaatggacaagccaaagcgctcttgacttaggcgtgccgcttccgattatcactgaatctgtttttgcgcgtttcatttccgcaatgaaagaagagcgtgtgaaagcaagcggccttctgtccggaccagacgttaagccggtcactgaaaataaagaagagctgattgaagcggtcagaaaagcgctcttcatgagtaaaatctgttcttacgcacaaggcttcgctcaaatgaaagccgcgtctgaagaatataactgggatctgaaatacggtgaaatcgcgatgatcttccgcggcggctgtatcatccgcgcggcgttcctgcaaaagatcaaagacgcatatgaccgtgaaccggagcttgacaacctgctgttagacagctacttcaaaaacattgcagaaagctaccaaggcgctcttcgccaagtgatttcacttgccgtagcccaaggcgtgccggtaccttcgttctcaagcgcacttgcgtattacgacagctaccgtacggcagtgcttcctgcaaacttgattcaagcgcagcgtgattacttcggcgcgcatacgtatgaacgcacagataaagaaggcattttccatactgaatggatgaagtaatgaagaagcccccgcattgattgcgggggcttttctgatattaaaaaccgcgggccgtcatgaacggcgccgcggtttttaaattttttcttatatattccaccagtggagaccgtctttttcaagaagatcgtccgaagctttcggtcccattgaccctgcttcataattcggagaaagggttttgtcggctgcccacgtttcggaaatcgcatcgacgaaattccaggaaagcgccacttcgtcccaatgggcaaagtttgtcgcatcaccgagcagacagtcatggattaatttttcataggcttccggtgtgttcatttcatcactgcagttgctgcagtagtccagcttaatcggctgagcatgagcggctccgcctaattttttagcgttcagatatagtgtgatgccttcatccggctgaatatggatgacaagcaggttcggatttacattcgtttcattgccgtaataaaggttcatcggaatgtctttaaattgaacgacgattttcgttgatttttctttcatccgtttccctgttcggatataaaacggaacgccggcccagcggaagttatcgattaacagctttccggacacgaatgtttccgtattggaatccggtgctacattatgctcatctgtatagcttggtacagagtttccgtcaatcgttcccgcttggtattgtccgcggacgaagtagtcactcacttcgtttggagcgacagggcggagagctctcagcaccttcactttttcgctgcggatttcttccgtgttcagtttaatcggcggttccatcgccaagagagcgaccatttgcaaaatatggttttggaccatatcacggagtgcgcctgatttttcataatatctcgcgcggtcttcaacgccgagatcctcgcttgacgtaatctggatgtttgagatgtagcggttattccacagcggctcaaacagcgcattcgcaaaccggatgacttcgatattttgaaccatttgtttgcctaaataatggtcgatccggtaaatttgatcttccgtgaaagcttcgcgtatttctttgttaagctctttcgcactcggcaggtcatggccgaacggtttttcaatgacgagacgggaccagccatttgtcgctgtgacaccttcgtttttaagtgattttgcgatcgtgccgaaaaactcaggagccatcgccaagtaaaacattctgttgttcgggatttcatatgtatgttcaagctgatcaagcaggacattcagctcctgataggaacccggattcgttacatcaaacggatggtaataaaaatgagatgtgaaatcgtctatgtctttttgcccggcagaagaaacagacgttttaaccgtttcccggaggtcctcgtttgaccaaggtcttcttccaacacctacaactgcaaactcttcaccaatttgaccatttttatataaacggtgaatggatgggtaaagttttcgttttgccaaatcccctgtggcaccaaatattacaattactgcttttggtttgtcgtttgttttcacttagagtacctcactttatctgaagcatggtttaaaaccccgcatatttccttcattttaaatctaaaattcattgaaagcaaacatttcagcctgttttttgcggtttgcggaaaaaaattaatcaggccggagaaggcccgggtgaattcacattttcagtctgatcctgtatccttagtagtacaaagatctaggaggaagcattgtggaattattatttttagggacgggggccggcatgccggcaaagacgagaaacgtaacgtccgtcgcgctgaagcttcttgaagaaaggcgttccgtatggctgtttgattgcggagaagccactcagcatcagatattacatacaacaatcaaaccgaggaaaatagaaaagattttcatcacccaccttcacggcgaccatgtttacggtcttccgggtctgttggggagccgttcatttcagggcggtgaagaagagctgacgatttacgggccaaaaggcattaaagcctttatcgaaacaagcctgaacgtgacggcgactcatctgacgtatcctcttaccgtacatgaaatcgaagaggggacggtttttgaagatgagcacttcattgttaccgcagcatccgtcattcacggtgtggaagcgttcggctaccgggttcaggaaaaggatattcccggcgcattgcaggccggcagattgaaagaaatgaatatcccgcccggacccgtctatcagaaactcaaaaaaggcgaaacggtcacacttgacgatggcagaatcattaatgggcgggattttctggaatccccgaaaaaagggagaatcgtcgctttttccggggatacgagggcatcagagcgggtaacggagcttgcgcgcaatgcggatgtgcttgttcatgaagcgacgtttgccaaggaagatgcaaagctcgcacataattattatcacgcgacgacagaacaggctgcgcaaacggcaaaaaaagcaggcgccaaacagctgatcttaactcatatcagcgcaaggtatcagggtgaatcgccgatagagcgtctcgaacatgaggcgaaagcggtatttgaaaacagtaagatcgcatttgacttcatggaggtcactgtggagcggtcttaaaaaatagacgcttgacatttttttctgatgatatataataaaacgtaataattacgatttaaaaaaggggtgaaaatgatgcgtgtgaatgttacattggcctgtacagagacaggggacagaaattatatcacgacgaagaacaaacggacgaatccggaccggttagaaatgaaaaagtattcaccccggttgaaaaagtatactttgcatcgtgagaccaaatagatcacgataacaaaagccattgtgccgttgcacaatggcttttgttttcatcagtttaccgcctgataggcaggagcattcatttgctggcgcaccgcgcaccaaacatcataaatggcaaggtggacgatgtgcggttcatcgtgatgaatggcatgagaactgtttttggcctgaatccatccgctttgataagagacatcaagcatgcttctgtgcagtttcacccattgttcatgagcgtgctttaagcgctcatcccgctctcccgatgataaaatcaacagcggcatatcgccgaaatgaatctgctgatgctggatctgcctaaggctcgttaaaaattctgcgtgtgatccttccaatttgaactgtttcaaataggcggccttcatttcttcaggaagaagcggaagcactttcgtctcctgatcctcagaaaccggatcaagcagcaccatcccgagaatatcccggcggttccggctcgcccaaagtctgctgataatcgtgccgtatgaatgcgagacgacaaggtaaggaggcttgacgccggccttcagaagaagagcgcttaattcctgtaccatatggtccgccgttctcttgtttcggcttcgtccgcttttgccgattccggctctgtcatatgtgaaaaccccaaattcttcatctatgtcagcgagtaatgatgtccatgtttcagaagaagtgccgtagccggcttcaaagacgatcgtcacttcgccggcgcctttacggtgtttcgtataaaacggacacccgtcaatcagatatgtcctttccatccatgctgctttcattggagtcatctcctctaattggttctatagggaagacggagaagcttcggcaatcgtttctcgaaaaataaaaaaagagacagccgggatcgaaaaactccggctgtcacttcatcaccatgctctgtcgtattggaccggtgacggtatttcagtattcagctgcttcgctgcactccttgcaaagtgcggatcgcggagaagttctctcgcgacaaaaataaggtcagcgcggttgttgtgcagaatttcttcggccattgttcccgtcgttatcaaaccgacggcgcctgttgcaatttcggcctgttcacggattttctccgcgaagctcacttggtagccggggaagacgttaatatcagcttgaacgagtgcgcctgagctgcaatcaatgaggtcgactccctgttctttcatccacttcgcaaaaccgatatgatccgcaatgtccagccctttgtctgtataatccgatgcagaaatacggacaaataacgggccgtcccagacttccttgacggcttcaatggtctcgcctaagaagcggtagcgattttcatgtgagcctccgtattcgtctgtacggtgattggacagaggggacaaaaattcgtgcattaagtagccgtgtgcggcatgaagttcaatgatgtcaaagccggcttctttcgcgcgcgccgctgcctgtttgaattcctgaatggtttctttaatttgttctgtcgtcatttcagccggtgttttggactgctcatcgaacggaatggctgacggagcgtaaatgtctccctcaagctcagctttacgtccggcgtgcgcaagctgaatgccgattttagatccttgcgctttcacttgttccgtcagtttggcaaaaccttcgatatgatcatcgctccagatgcccaaatcctgatcggaaatgcgcccctgaggattaacggctgtcgcttccacgataatcaggccgacctgtccgattgcacgcgatatgtagtgcgccatatgaaaaggctgcagttttccgtccttctcatgtgaggaatacatacacatcggtgccataacaatacggtttttgatcgttacatctttaacggtccatggtgtgaataattttctcgccatttatttcgcctcccggaatgtttttcgacattgattataacaactcatgatcattcagtcatataaactgctcacaactgaacagatcgttcttattgttctggacgggcatttttttatacacagcgtggccgtatcttcataacaggcatttacagccgatcatatagcaaatatagatgagaaacgcaccgatgactgcgtggcctcctttgatccagtttgtcaggatgaaaatactgctgatgaagatcactgcgccgaaggcaccgaatattccgtttttttgagcggctctgaaatcgtcggggctcatatttttcagctgcaagtgaatattcagtaacgacatgatcggcagcaatgtgataacgcctgataaaaataagtatttcgacttgcttaaatacgcggcggccaccataacggtgccgccgataaaaaattgaatgagaaaactcatgctgaaacgctcaccttctgtttgttatcaagtataatgatggagacattgccattttatttttgattgatgtataagtaaactaaatataactaatgcattggataataaagaatgatatctgggagatgaagccgattggatttaaagaagcatttagcctttattaaaacggtagaaagcggcagcctgacccaagccgctgccatattgaattacacacagccgaacatcagccaaatgatcagtaaattagaggaagagtacggttttccgcttttgatcagacagcggcatggagtgaggcccaccgcaaatggcttgaaagtgttacatattatgaaggaaattcaaaaaaactatgaaaaactgtctcaaaccgttgataatattaatgggttagaaagaggggaagtccggctcggcactgttacgagcgtggcggtaaaatggctgccgaaaattttgagggaatttaatgagctgtatccttctattaaggtgcatttatttgatggaaattctactgagctggaacaatggctgaaagatgaccggattgatgcggcgattgggacatcccacagcgagaagtggcatttttacccgttggccgaggacccgattgtagcggtgatgagcccgcagcatgaattggcgcaatatgaaacggttccgttacatgtcatggagtccgtcaaatgtatcgtgccttatccggagacacattttgatgtgctgaaagtgttaaaggaagaaaagatcactccgcgggttgcttatcaaatcagaggggatgaagcgattattgcaatggtgcggaataatctggggatcagcatcttgccgcagcttttggtgaatgatggtgatgtgctcatcaaacggttcgaccggtatgtctccaggcagctcggcattttgacagctcgtgcaaaggagacgcagacaccttctgtccagaaactgattcaatgcatacaagaatgggttgcggtccatcaggcttctgcctgaagaagcctgatatgcgtttaagccggttcaggataatagaccagcaataaatatgtcatcggttccgaggaatgaaaataactgtgcggcatcgcccgaagtcagcacatgcttttcgtcatgaagctcaaccgtcaattcaccgctcttgattaaaatgattcccctaaatgtgattttgtctcataggcgcagcccggcttcaggtcaactatgccttgaaaacaaaaatttgaccgtgacggtggtgagcggggttattttgatgtcgggctttcgtctgtttatataaaaagggcatcaacggcacatgctgttgatgctttttttgaaatgctagggtttggagagcacttcaattccgacgttgaccattttgtccagccccataaaagacaggcagattttggcgcgtctttttcttttatcgatttttttaataatgccttccattcctttaagaggccctgaggcaacggttacttttgaattttcaatatagacttttgaataatctacagtgtctccttctccgatcagcctgataatagggaggatttcttcatccttaattgtcgtgaaataggttttgcgctctttggaataatatgctccgttattcacgattctgcatgaaatggggagttctttgattttatgaaatgtccgctctgtcatctttgttttaaacagaacatatcccggaaacatctttttgagtgcctcgtatttaattccggcttttcgttctgtgacttttttcttgggtatgattgagtagagagcctgctcatcaaactgcagacgcagaaatttttgaactgcttcttcttttcccgactctacaaaaagtgcgtaccatttcatgactggatcctccttagaataataagaaattattatacaaagaaagtatttaatggatagtatttaaagtgattaaaaatttttctaattcgtcttttttttacataatatatgaaaatgaaaaataagtatagacccaattgacagagaggcgatgaattttctttgacatgaaaagggttcagggaattatctgacatttatcccgaaacaattatgccgactgtccaccgaatataaaactgtggaataaatgtcagaaaataacgaaataaagccttgacattattatctataaattgatattattctctttaaatagcaactatttgttaaatttattaaattaaagtaaagcacctattaaatttcaatcgctgtttcggcacgttgaagaggaaatagggattataaaaatgattgcagtgtatatatctacatatacatgataagggagaagtgtgccgtcatggctgttttcgggcatattggcactgcagcttgtcatgcgaaacattcagtaaacaagcaagatgttttaatataaattatgttagaaaaggaaaacacaatgcgtttgcgatttttaaacctgtgctgaatcgcaaacgcgtttgtgtttttatttttatggcggtgtttacaccagtcaatatatgaaataagagacgtttttgtatggagaaccacatgtgatgtacaaaattggcgatggggaaaggatgaggataagatgcttacgtttgtgttcccggggcagggttctcaatttaaaggaatgggagccgggctgtttgatgaatttcaagatctgacacgtcaggctgatgacatattaggctactctatagaagaattgtgcctggaggatccgaatcatcagctggggaaaacgcaatttacccagccggcgttatatacggtaagtgcactcagttatttaaagaagattaaagagtccggcagagagcccgattacgccgcagggcacagtttaggagaatataatgcgttatttgcggccggctgctttgattttaagaccggtttgcagcttgtgaaaaaaagaggggagctcatgagcaaggcagctcccggaggcatggcggcggttttggggtttacggctgaacaagtaaaagaggttctatccgattatcatctgaccggcattgatatcgctaaccacaattcaccttcgcaaattgtgatcgccggaacgaaacaagacattcaaaaagcgggccccgcctttgaaaaagccggcgtgagaatgtatcttcctttaaatgtgagcggcgccttccattcccgctatatgaaagatgctgaaaaagagttcgcggattatttagaagaaacggcgtttttgcctcttcgttttccggtgatctcaaatcttcatgccgcaccttataagaatgatgaaatcaaaacaaatctgactttgcaaatgaccaatcaggtaaagtggacggacacgatacgccgtctgataggacttgaaaataatgaaattgcagaagtcgggcccggggaagtgctgacaaaactgacgaggcagattaaaaaagatgccgtcccattacctatgccgaaagaagagtctgatactgctgatgttaaagcatcggcagctgattcccaaaaaacggcgggaatgagattagggaacgaagattttaaaaaagattataacatccaatatgcttacatgacgggctccatgtacaggggaattgcttcggaacagatggtcattaaagcggcaaaagcgggaatgctgggctttttcggaacgggcggattgagtatcgaacggatcggacaggccatcggaaccatccggtctgcactgcggcaaggggaaacattcggaatgaatcttcttcatcatatgatgtcacctgacaaggaagtcagaatgatagatttatatttaaaaaacggcattcaccttattgaagcatcggcatttatgggcataaccccggctctcgtgatatacagggcaaagggattaagcaggaatcatgacggatcggtgtcagtccaaaacagaatcatcgcgaaagtatcccggcctgaagtcgctgaggcctttctgaatccggctccggctcatgtgctggaaagacttgtgtctgacaatcggctgacagccggggaagcggcgcttgcaaaagaaattccgatggctgatgacatttgcgttgaagcggattcaggagggcataccgaccaagggattccgtatacattaatgcctgccatgatcagactcagagaccgcatgatggagaagcacggttatgcgaaaaaagtaagaatcggcgcagcgggcggcatcggcactccggaagcggctgctgccgcgtttctgctcggcgccgaatttatcggaaccggttctattaatcaatgcacggtcgaagccgggacaagtgattcagtgaaagatctgcttcaggaagcgaacgtgcaggatacgtcatacgctcccgcgggagatatgtttgaagcgggagcaagggtgcaggtgctgaaaaaaggcctgtttttcccggcaagagccaataaactctttgacttgtacagacaatacaattctttagatgaaatagatgaaaaaacgaaaacattaattgaagataagtatttccagcgcagttttgaggaagtgtatgagcagttgaaacgtgataaatctcctgaacagatcgccaaagccgaacagaatccgaaacacaaaatggcgatggtatttaaatggtatttttcccatacgacgaggctcgctctggaaggaaaaagcgaaagtaaaatagattaccaaattcattgcggccctgcgctcggcgcgtttaatcaatgggtgaaaggaacccctcttgaaaattggagaaacaggcatgtcgacttgatcggcaaacagctcatggaagaaacagccggccttcttgcgcaaaggctggtatcgattacaggctgagtatgaccagacattacattttttctgcggaggactaccatgctgattgaaaatcatgaattaacgatgagccatgtcggattagggaatttgaatgagtacgcgctgctgctgttattcggcaatgcacacagtcaccatttaacggacggaacgggattccggcctgatcagatggccgatcaccaagggctgattttgtatccggcttattttatgacacatctcaaagttccttcagataagcctcttgatcagtaccgattatgggacgaggtttccgtcggagtcgatatctcccggtttggagaaaccatattagaatctgattatttgttcgggccgaaaggagcggtcagctctgataaaagcgagtgggaccggggacggtttccttctatgaaagccaatagtttaattgtcgttgacgtcacacaaacagaaggttcgacgcgcaaagtctcagcgccgaaggctgaatgtattgcggaactttctaagctagccaagccgccttacgcgctgatgcggtcaaagaaagtcagaacggacgctttcggtatgaagccgggaaacctcaaaacagcggaccccgtttcatatcgggttcctgttgatcaggatgctgcgccggggcatgccatggtgtttgcgaaattcagcaagataatggatgcggcggaatttgaatggatgacgcgccggtcgaagccgggttttccggtttcaatcgcgcggcatttatttttgcttgaaagagagacgtattattacggaaattgttttgcagatgaagagcttgatatttatatgacgggacacattgaagaatgcgatcccgactttcacggtgagtccctcggtatgatctcagtggcgaaaatcagctatcagattgaagtctatatgaaaaggaatcatacattgctggccatttccaaggtggataagctgctggcggtgccgacctcttcacaagatcatattccggattataaacgggtcatcagaagtttataaaatgaagaatggagctgaaagcaaatggaacaaaccaaggaaatgaagcagatcatcgctcaaattattcaggatattcaagaacagcagtcatatcgggccgtcgaagcgggagatgatgtgagagtcatagaggatctgggcttctcatcactggatatcgctcaattagtcgcacagatggagatggaaaccggagtggatcctttttcccaaggagaaacgatttccagcattacaaccgtcggcagcatttgtgatatttatcaaaaatacatggacagtgctcaatcatgaaaacagaaagcaggggagatatcagctgggtgactgataagcttagggaaacgcaggacagtgagtttctcatttttaaagggcagacttttacgtatgatgatttgctgacacgaatcagcttttttcagaaagaacttgaacaaaacggaatacgtgaaggagaatgtgtggcgcttatcggggattattccccgaacgccatttttttgctgatggcgcttttgttaaaccgaaatatcgttgtccctctcagcaatgaatcaagggaaaagcatctcgatatgtttgaagacgcgaaagtgaatcaaatcattgaaataaatgaaaatgacagctggacgcttcgtgaaggttctgaaagcgcctctcaccctctgcttgatgacctgcgcgagaaaggggagtcaggcattattattttcacatcgggaacctccggcaaaagcaaagcatccgtgttaagcgccggccggctgcttgaaaaatacaaaacggcgaagagaaaaccgctgcgtacgctcatttttctgaaattggatcatataggcggcattaatacgctgtttgcgattctgtttaacgggggaacgatcgtcacatcagacagcagaacgccggagtccgtttatcaggcggtcgacaaatatgctgtccaagtgctccccgccacccctacttttttaaacatgctgctgatgtccaaggcggatgccggctataacctgtcttcactccagctgatcacttacggcacagaaccgatgccccaatcaacgctgcgcggcattcaccggctgtttccggatgtacggctgaaacaaacatacggattaactgaactgggtatattctcaacgaaatcaaaagacagccaatccacttggatgaaagtaggcggtgccggaacagagaccaaaattaccggaggcacgctttgggtccgttctgagtcggcgatgctcggctatttaaacgcaccctcacctttcgatgaagacggctggtacgacaccggtgaccaggtggaaacagacggcgaatatataagaattctcggaagaaagagtgaaatcattaatgtgggcggagagaaagtgtttccggcagaggtggaaagcgtctttctggagatacctaatgtccgggatgttctcataacgggccgaaaaaatccgattacaggcgagattgtcgcggcagaggccgtacttgaaaaagaggaagatatcaaatctttcagaaagcgggccgtagctcattgcagacagaagctgcagccatatcagataccgcagatcatctctgttacagatcggaaactgtctaatgaccgatttaaaaaaataagaaacgtataaaacaggaggcaaatatgaataacggaaaagtagcggtcgtcagcggaggtagccgggggctcggaaaagcgattgtacaggcgcttttggatgagaattacaaagtagccgctttcagccgcagtgaatctgattttattaacacattgagagagagtgaaaagtaccgtgaccgcttttattgggaagcggcggatgcggcggatgatgccgccatgaaacagtttgttcttcaagtgtaccgcaagttttccagaatagacggcttggtcaataacgccggtttgaaccttgatcagctgctgcccctgaccaatgatgaagacattgaccgcatcctcaatctgaatatcggttcagtcatcaagctgacccgaaacgtttcccgggtcatgctgaaacaaaattccggatcaatcgttaacataagctccattatcggttcaagaggatttaaaggcacttcagtctacagcgcatccaaagcggctcttgacggcttgacgcgaagcctggccagggagctcgggtccaaaggaatccgtgtcaattcacttgcgcccggttttgtggacaccgatatgacgaaaaatatgccggaaaaacaaaaatcgcagattatcagaaggacgccgatggggcgtttaggcgaaacagacgatatgaccggactcgttcgttttctgctttctcctgaatcgtcctttatgaccggacagacaatggcaatagacggcggattaacttgttaaagcacagaaaaattcttttgtacaagggatggtatcctcatgaaatgtattaacgaatttttaagaacggtaatagcggaaaagctgggtgccgaggtgaccgaagcagaagataaaaccgctttttttactcttggcgtgacgtctctcatcagtgaagaaatcatgaccatattgcataaagaatttaccggcctttctgaaacgctgctgtttgaatatccgaacattgagaaattgagtgagtttttaagtgcgcagaaacgaaatcccgaaagcgttcttgaattcaaagaaacggagcctgatacgggaagccggcaggaagaagaagtgcttcctgtacaggcggctgaaaaggtgcctgaaccgggaacggacaggagttctgatattgcggttatcggaatgagcgggatgtttccgaaagcggaaaaccagcatgatttttgggacaatttaatggaaaataaagattgtgtctccgaaatccctgaggacagatgggacagctcttattactcggaagagaaaacggcaaaatacgcgtcatacagtaaatggggaggttttattgatcgtccggatcgatttgacccgctgtttttttctgtttccccgtgggaagctgatttaatggaccctcagcaaaaattgtatgtcacgtgctgctgggaagcgatggaggatgccggttacgggaacccggcggcgaggccgacggatcaaatcggtgtattcgccggagtgacctggaatgaatattcattaattgcacacgaagaaggtttcctcaaagatcagtataaaggccccggctccttatattggggcattccgaaccgggtttcttattttcttgatctccatgggccgagcatcgctgttgatacggcgtgttcttcatcgcttgtcgccgtccatcaggcttgtcaggccattatgtcgggcgactgtgaaatggcgcttgccggaggcgtcaacctcagcttacatccgcaaaaatacatgtttttaagccaatcgcattttctgtcttctgaaggaaaatgccgcagcttcggtgaaggcggagacggttacgtgcccggtgaaggcgcgggagccgttttgttaaaaccattgaaaaaagcgattgcggacaacgaccacatctacggtgtcattaaggggtccgccactaatcacggcggcaaaacgaccgggtatacggtgccgaatccggaagcgcaccgggacctgattttatccgctataaacagagccgcggtaagtccggcggatatcagctacattgaagctcacggtaccggcacggcactcggcgatccgattgagatacgcggtctgtctatggcatttgagaaacagaccgatgagaaaaatgactgcggaatcggctcggtgaaatccaatatcggacatttggaagcggctgcagggatcgccggtttaatcaaggtgcttttaagcatgaaacatgaaacgcttcccgccagtctgcacgccgaggaactgaaccgcaagatttctttttctgattcgccattttatgtcgtccgaaacaatcggccgtggccggctgaaggagataaaccgagaatcgccgcaatcagttcattcggcgcaggaggctctaatgcccatctgatcgtaggtgcttatcagccaaaacggcaagcggacgggaatactgagcaaaaaccgcatgccgtcgtactaagcgcacattccgaacagcagctgaaagaatatgccggaaaattgagctcctttcttgcccgattggaaaactcgccttctgccggcggatacagcctggaaaatatcgctgccaccctattgtcaggcagagagcctttctccttccggcttgctgtcattgcgtcatcccttcccgagctgaaacagcgattggacggctttgtgagcgggcacagcggcggcaggcatatttacttcggaaaagcgtcacccggacggccggacgtttcaggccaatccgtttcagatcctgaaaaatttgccgcgctgtgggtcaaaggccttcaaggtttcaaaaagccggagacgccgtatcagaaagttccgcttcctacgtatccgtttttaaaggaaacgtcctggctgaccgaccaaaaaaagcggtatacgaaaaagccccaatctgtcaaaaggcgtgaagcgctgcatccgctgcttgatgagaatgtttcatccgcccggaaagggacgtttcaaaagatattttccaaggatgaatatttctttaaagatcatttagtgaacgaaaaatatgtgctccccggagtctgtcatcttgaaatggcggcatacggcgcggcattgtggggagaacgcccggtcgtctctcttcaaaatgtgtggtatatggagccgattgtgacagggacagacccaagatccgtcatgatagagtttgaagcggaaaaagagcgtataagctatgtcattaaggaaaaaggagcggacggcactctcttttcgcaaggagaagtgatttgtaaagaaaatggagcgtcgtttgaggccccggtctttcagcttccggcgccatttacgcagagaacggagccgaaagacatctatcactcgttctctgaggcgggaatcgtgcaaaaggacagttttcaggtcatccgcgaattctcttatacagaaaggaaagcactggccaaattaacgctcccgtcacacttggaagcggattttaaacagtacatcctgcatccgtccttactggatggcgctgttcaaactgcaatggcgcatgtgctgcaatttcaaaaagagcctgcgcttatcgtaccgttttccttcggagaaatacagctgcttaaaccgttagcgaaaaccgtatttgtgcatgcggaggtaaaagcggcctccgttcaccaatttgatctgcatatttgtgatgagcgcggtgtgctgctggcggcagtgaaagattttatcataaaagaggtgcaggaaagcgccgggtttaaccaaaaagccggcgtcatgccgaagaaaagccgtgaaacggaattgcttatgacaccggtttggaacaccgtcaccattccggaaaccggcatgtctttcatgcgtgaagaaaaaataatcgtcatcgggggcgggccggattttcagcaggctttgaaagagatgtattccgatgtccgttttccggacatcacttctttggacagcgcggaacaaatagctgaaacactgaaagcgcaaggctcttttcaacacatgatatgggcggcgccggatcatccgattccatccgtttatgatgcggatacggccgacggacaggagcacggggtcatgcagcttttccggctggtaaaatcgcttctgcttctgaattttgacacggaacaactatcattgacaatctgcacgtttcaagcacagccgattcatgaacatgatgaggtcaatccgagtcatgcaagcatacacggattagcgggggcgctcgcaaaagaatacagcaattggagcatccggcttcttgatttggaatctcaaaggggagaccggcatcttcccgatatcttctctttaccggcggaccccgagggaaatccgtgggtctttcgtgcaggtcagtggcaccgccagcaattggccgtctgccagcctcatgcaggtgagccttcattataccggcacggcggggtttatgtgattatcggcggagcaggcggaataggagaagtatggactgaatatatgattcagacctatcaggcgaaaattgtctggatcgggagacggaaaaaagatacacagattgaaagaaagctgaaaagacttgcggctttaggtcccgcaccgcaatatttcagcgcggatgctgcggattatgattctctcaagcgggcgtatgacaccattgtgaaggaacatggaaaggtgcgcggaatcattcattccgccatcgtgttatcagaccggagttttgccaatatggaagaggaccagttccgcgcttcactttctgcaaaaactgatgtcagcttgcagattgcccgggtagctgaaggggaaccgctggatttcttgctgtttttctcttcgatgatgtcgtttcaaaaagcgccgggacagagcaattatgccgccgggtgcacgtttaaagacgcttttgctaagcggatctcacaaaaagcgccgtatgccgtaaaggttgtcaattggggcttttggggaagtgtcggcgttgtcgcttcagaacaataccggaaacggatggagcgggacggaatcgcttctattgaggcgcccgaagcgatgaaaacgctggaaaccctgctttcgggaccttatgaccagctggcgctgatcaaaacgacagatccggtttttatgaaagatgatctgaaagaacaagtaacggtttatccggaaaagattccttccgcactcggacaattagcggttaacatcacgcagaatgacgaagctgagcgggtaaaagcatcaaatgtcatgagctgcatgagagagatggaatccctcattgaaaaaatacttgtatcaaccctttatgagatgggcgcaaggcttgatgagactttgccgttatttcaatcggctgccggcataacggaacaatacagcagatggctgaaagagagctttgtcttcctgactgaattagcgcttgctccggaaaaaacggatctaggggaggtgtgggaggaatgggagcggaaaaaagagacttggctgcgccggaaagacatgagggcgcatgtcagattggcagaagagacattgcgtgtgcttccagacattttaaccggtaagcttccggcaacggaagtgatgttccctgactcctccttccgtcttgtggaaggcatttaccgcaataatatcatttctgattttttcaatgacaagcttgctgacacattgattgcagttttgcgggagcgtctggaaaaagacccgcaggcgaaaatccgcattttagaaatcggagccggaacgggcgggacgagcgccgcggtcatgagaaaattgaaaccgtatgaagcgcatattgccgaatattgtttcacagatatttctaaagtatttcttttacatgcagaagacatattcggtccggaatatccttatgtcacttataaaatattcaacgctgagcagccggtatcaacagaagcgccggacatcggcacgtatgacgcagtgatcgcgaccaatgtgcttcatgcgacaaaaaatatccgctctacgctgcgccatgcgaaagcaatgctgcaaaaaaacggccagctgtttataaatgagatcaacagccgcaccgtattcaaccatgtgacgttcggccttcttgaaggctggtggctgtatgaggatcatgatttacggattccgggctgtccgggggttgagccggccggctggtcggaagcgctttcacttgaagggttcgtccatcctctgtttccggctgaagccgcacacgacttaggccagcagattatagcggctgaaagtgacggaacggtcaggcttgccctcccgcaggcgtcagaagaaaaaccggagcgccgtccgtatgacgcagatggtctttcggatgatacattgcatttcagcttgagagaaaaaagcgttgaactgatgaagaaggtaatcggtgaagcgcttaaagtgccggcgcatcgtcttttatcccatgaacctttaaccgcatacggattggattccatactggtcgtcagactgaccaacgcgttaaaagacgtcttcggttctgtcagcagcactttgttttttgaatatcaaaccattgatgagcttgctgattactttctgtcttcccgtaaagaagcgctcgagcggcaattcgggaatggacgggctcattccgaaaacgccggacggatgcaggctcccgcagaaagcgccgcgccgattccaaacgtaagggaacggggcatcacatatctgacggaattaataggaaaaacgctaaagattccgagcaggagaatggatccgtcggtttccttaaccgcatacggtttggattctattctggtcgtcaggctcacaaatgcttttcgtaacgtgtttgaccaaatgaccagcaccctcttttttgaatatcagacgatagaagaaatcgcggattacctgcttctttctcagcggagagcatttatgaaagcgatgggtgtgcgtgaggagcagctgtctgatcacacagataacctgaatgtaattcctcaaaacgaggaagaaagcaggacaaacggagatccctatatccaggatatcgctgtcatcggtctgtcaggccggtatccgggcgccgatcacgttgatgagctgtgggaaaatgtaaaagccggcaggcattctattacagaagtgccgaaagatcgctgggactggaaaacgttttataacgaggaacgcggaaaatgggggtccatttattcaaaatggggcggtttcctcgatgacattgataaatttgatccgctgtttttccgtatatctcccgcggaagctgaaaggatggatccgcaggaaaggttgtttctgcagactgcttattcaagcattgaagatgcggggtacaccccggccacgctttgtgacagccggaaaatcggagtctttgtcggtgtgatgaacagcaattacccgacagttcccagcgactggtctatcgcaaacagagtatcgtttttgttcaattttcaagggccgagtatggctgtggatacagcctgttcttcttctttaacagctgtccatctcgctgcagaaagcctgcggagcggaatgagtgaaacagcgattgccggcggagtcaatcttatcgttgatccggctcactatgagcggctgtccgctttttcaatgctgtctcccggtgataaatgcaaatctttcggagacagggcggacggttttgttgacggtgaaggagtaggggcgattgtgttaaagccgcttgctcaagcggagaaagacggcgatcatatttacggcgttatcaaaggaagcatgctgaacgcagcaggcaggacaaacgcttatatggtgccgaatccgaaagcgcagtttgatctgatcgcagagacgttgaaacggacagacattcacccgagaacggtcagttacttggaagcccacggaacgggcactgcgctcggtgatccgattgaaatcgacgggttaacgaaagcttttcgcctgacaacagaagaccggcagttttgttccatcggttcaattaaatcaaatatcggacatttagaaagcgctgccgggattgcgggaatcaccaaactgcttctccaattgaaacataagaggattgccccttcattgcatgcggcggaattgaatccgaatattgagtttgagcacactccgtttttcgtacagcaaaaagaaacggaatggaaacgacctgtcttgaatatcacgggtgaaatgaaggaatatccgagaattgccggtatttcctcttttggagcaggaggggcaaacgcgcatatcatcattcaggaatatgtgccgtctgacagcctgaaaccaagggaaaacgcgtctgtttctccgcaaaaaccggctgttattattttatcagcgcgaaatgagcagcaattgacagagcgcgcccgccagcttctggatgatgtcataagaaaaaaacgttctgacggggatttggccaaaatcgcttacacgcttcaggcgggaagagaaccgatggctgagcggcttgcatttacggccgagtcgatagaagaactgaaaatgaagcttatgagtttctcaaacgatcatatcgaacatgctcatatctggcggggcaggacagccaaacatcattcattggcggcttcgctcacttctgatgaagatatggcgcttaccataaatgcctggctgaaaaaagggaaatacggaaagctgcttgacctttgggttaaaggacttgacgtcgattggtcagctctttatcagcgcaacccgggccgcatcagtctcccggcttatccttttgccaaagaccgatattgggtcacaaaagctgatgtgtcacttgacaaaacaggctcagcggaaagtgagaaagcagccagacttcacccgctgctccacgcgaatacatcgacctttaccgcccagcgctttacttctgttttttcagggcgtgaaccgttttttgccgatcacatcgtcaatggaaaaccggtgcttccgggcgcggctgctttagaaatggcccgggccgccgttacacttgccgctgagggcttgccgggcgggaaagcgggtgtccggctcaaacagatcgtttggctccgtccggtgacggcgctttctgaaggcgtgacgcttcatgtaaagcttcagccggaagaaaacggagacatcgcttttgaagcgtatgccgaaggagaagagccgcttgtctttttccagggaaaggccgtgctcgaagagacggagcgtgctccggtactcgatgtggaggcggttcaggcgcgctgcggcggccggcgcatgtcaaaggctgagtgctatgaagcattcgacagtctcggcatcacctacggaccgtctcatcaggcgcttgacgccgtctatgccggaagcggagaagtgctcgcgaagctcactcttccgccgtacgcccgcgaagaaaaggagccgttcatcctgcatccgagcatgctggacgccgccctccaggcttctatcggtctcgtgcactcagacggttccgcgtccggacggccgtttctgccgtttgccctccaagatatgcaggtgttttctgcgtgccgggagacgatgtgggcggtgctttcctcagcggacggcgcctatcatattgagctgtgtgatgaaaacggcgaggtatgtgtccgattgacggggctcaccgcccgttttctggaagaggaaacggagggaaaaccgctcttgcttcagccaaagtggcaggaatcaccgccgggtgaaggcggcggacaagcagagtctttcagatacgtgacgctgtatggcggaatgaacgctgaggacataaacggcgccgtatgtgcggctgacggggaaggtccgattgaagaccgttatgacgcctgcgcggcggagctgtcagcgatcgtcaagcgtcttatcaaagaaaaacagaagggaaaaacgctgatccagcttcttgtccccgacaggggggaagacaatgtattggcggggctggccgctttcctgaaaacggctcaccttgaacatccgaagctgtacggccaagtcatccaagccgatccggacgagccagcatcatcgcttcttgccaagctgaaagaaaaccggacgcaccctgaacaagcggaaatccgttatcaagccggcaaacgtctcgtcagaaactggcgtcacctgcctgcgcttcaaagcggcgccgttccgtggaaagacgaaggggtttacctcctcaccgggggagcgggcggcatcgggctgattttcgctgaagaaatagcctcccgcgtcaaaaacgccgtcctcatattaacgggaagggcggaagcgcttgataaagaccgctccgcccgcttacggcgcttggaagcgtcgggtgcccgcgtattgtatcaaccggttgatgtgacagacagggcggcggtcatcgccctcgtccgcggcatacaggaggagcacggaacactcgacgggatcattcacggcgccggcgtgatcgccgacaattacattctgaaccagacagaaaacgaacggaagaccgtcatggcgccgaaggtgaaagggcttatcaatcttgatgaagcagcgaaagatgcgcggctggactttttcattctgttttcttccttggcgggaggtatgggaaacccggggcaggccggttatgcggcagccaacgcatttatggacgtatatgcagcccgccgaaatcgtctcgtgcgggacaacaagcggagcgggcagaccctgtccgtcaactggccgctttgggaagaaggcggtatgcgcgtggacaaagagacagaacggctgatgtatgaacagaccggaatgaaagccatgcgatcggcttcaggcatccaggcgctgtacgccgcttttgcctccggagcacaccaggtcatggtggcagaaggcgacgagaaacggattcgaaaaaacctgatgcctgaagcgccggaaccgtcacgcagcattcatgtgtcaaggaagacccacgtccatctgccaaataaagtacaagcggaactcaaacatatgatatcaggcattctgaaggtgaaagaagaagaaatagatgctgaatcagagatgagagattatggatttgattcggtttcattcacgcagtttgcaaatgaactaaataaaatgtatgggcttgaactgacgccggccgtgttttttgaatacccgacagtctttagttttgcccaatacttgctgacggaacatccggatacattcggcccacaggaagaaacagaaacggagaaaccggttgagcgtaaaaaaatgaagacggagccattctcgattccgtcccgccttcctaaaacaaaaaccgcagctgaacctgaagagcccgtggcgataatcggaatcagctgtgcatttccaatggctgaaaatccggaaatgttttgggagaatttagccggagaaaaggactgtatttctgaaataccgccggagcgctgggactggagacagtattacggagatccgcagaaagataaaaatgcgagcaatgtaaagtggggcggcttcattgatgaaaccgctcaatttgatcctttatttttcggtatttctccgcatgaagccgaaatgatggatcctcagcaaagacttttaatgatgcatgtatggaaagcgattgaagatgccggctgctctgcaaaaagcctgtcaggtacaaatacaggcatttttgcaggcacgacaaacagcggttacgctcaggaagcttcaaagttccatatagagattgagggttcttccgctgccggaacggttccgtcaatcggtccgaaccgcatgagctattttctgaatatacatgggccgagcgaaccgattgaaaccgcctgttcaagctcattggtcgctgttcaccgtgcggtcagggcaattcaggccggagactgcggcatcgcgattgcaggaggcgtcaatgctattgtgtcgccggacatgcatatcagctttaataaagcaggaatgctcagtgaagacgggcgctgcaaaacattttccgatcaagcggacggctatgtcagagctgaaggtgccggcatgattgttttgaaaacattatctgatgcggaacgtgacggcgaccgtatttatgccgttatccgcggaacggcggaaaatcatggcggaagggcggcttcccttacatcgccgaatccgaaagcgcagacagaagtcatgataaaagcgtatcagcaagcgaacatcgacccccgtacagtgagttatattgaagcccacggcacgggaacggcgctcggagatccgatagaaatcaacggactcaaagcggcttttgcagcgctttatcaaaaagccggagtaacggcacccgatcagcctcattgcggcctcggttccgtcaaaacgaatatcggccacacagagcttgccgccggcatggccggacttttaaaaattattttgcagatgcagcacaaaacgctcgttaaaagtctgcattgtgaaaccgttaatccgtatatcagcctcgacggcagcccgttttatttcgtccgcgaaactcagccgtggaaagcggcgactgatgatagcggaaatgaactgccgcggagagcgggtgtcagctcgttcggatttggcggtgtcaatgctcatgtcgtgctcgaagaatatgtttctcctgttgaagagaaacaatggacggccggtgaacttcagccgtccttattcattctctcggcaaagacggcggaacagctgaaggaacgtgcggaacagctgcgcagatatttggaaaagtcacattcagctgacggagctcttgcggatatcgcttatacgcttcagcttggccgggatgaaatggaagagcgccttgccgtcattgctgaaacaaaagaagagcttacgaacgcgctgaatgatttcctcagcggcaaggagacggggcagaatttctttacaggccggaacaaagcgatgaaacagctgtttacagagatgacggacaatgcagaaatgagcggggccgtagatcaatggtttgaagcaggaaagtatgcaatgcttgcaaaattatgggtgcaaggcttgcatgttgattggagtaaattgtatcaggacgaaagaccgaaaaaagtcagcctgcctgtctatccttttgcgaaaacacattgctggataccgcacagtgcgcagcatataaggcaccgggagacttacgggactgatacgtccccgcttgagacttatgagcgcctgcttgatgaattggagaaaaacgaaataagcatagaagccgctgtaaaaagaacgatcggtttttacagggattagcgtaatggaggaaaccatatgaaagagtttctgcaccgggttttttctgacgtcaaaaataaaaaaatgacaaaacaggatgcgatcggcattttgcgcgattatgatatgcggatgggacttcgccaaacggattcccttcatccgcttgctcagcagcatatttccgatgaaacgggacagggattctcggcagctttcagcggccgggaattttttctcgctgatgtttctttacagcataaaaagcttatgcctggagaacttcttttggaaatggcgagagctgcggctgttttgacagtaaaggagactgcggctgtccggctgacgcatatcgtgtggtcaaagcccattctgactgaggctgagccgttccatatcgaaatcaggctgatacccgcagagggtgaagccaaaaggtttgagatttataatccattttctgctgattccagtcattatgatgtgtacagccaagggacgattcagccagttgatgctgcgcccggcatgctggatatcagccgcttgaaggaaaacagcggttccctgatggataagcagcaaattgaagccatcactcagaacgataccgttcaatacagtgagcacatgaaaggaattgagcgtatttacgcttcatcaggacggatgctggcagacatatcaattccattgacaaaccaaaaagaatccgcccgattcggcctccctccctgtgtgatgcaaagtgtgacagaggcatgcgcgctgcttggcggcaaagaatataaaacgctcgctccggtttcattggacgagcttttgttttatgaatcttgtcctgacaaggtatgggccgagatacaagagaaggcggggagcttttatattgatttatgtgacggagaaggaaaaatatgggcttctctgtcggggttgaagctgcagcctgtcatcaagacgggcgcttccggaaaaaccaatgccgaacaccgcagtgaacgtttgtatgaacaaacgcttcttcagctcaaaacgctttttggcctgactgcaaaaattgctgtttccaacatagatactgaagagccgctggaaacttacggaatcgactccgtcactgtgacgaaattgaaccgcgaattgtctctgcttttcggtgacctttccaaaacggttttttacgaatataagacactgggctccctggcagctcactttgtcacggattatccgaatgaatgccgaaaatggacaaatgatgatgagcaccgttcaggcatatcagaacaggttttggcaaatgaagattttccggtgcttccgtcgtttatcaagcgaagaaaacggcctgctttttccaatgagaaacagacaaaagaagggattgcgattatcggagtcagcggacgttatccgcaagctgaaacacttgaagagtactgggataacttagcggccggaaaagactgtgtgaccgaaattcccgaagagcgctgggaaaaggacaggtactacaaccctgatcccgaagcggccgtgaaagcagggaaaagttacagtaagcggggcgggtttctgaaagatgccgctttctttgatccgctgttttttcaaatttcaccccgtgatgctttgaatatggacccgcaggagcgtctctttattgaaatgtgctggcaggtgctggaggatgccggttatacgaaggaacagcttgagaatctgtataacggccgggtcggcgtttttgccggcattacgaaaaacgggtacggaatgtactggaaaaacggcggcaccctgcagccgaaaacgtcgttcagttcagcggccaacagagtttcctattttcttaatctgaaagggccgagcatgccggtcgacacgatgtgctcgtcttcgctgactgcaattcatgaagcgtgtgaaaacatccttcgcggcgcatgtgacatggcgattgccggcggtgtgaatgtgtatacgcatccttcggcttatgcggagctcagcgcctatcgaatgctttcaaaagacggaacgtgcaaaagtttcggtgaaggcggggacggatttgttcccggggaaggcgtcgggaccgtgctgttaaagccgctgtcaaaagcgatggctgataaggaccatatttacggggtgattcgcggcactcatatcaatcacggcggcagaacaaacgggtatacagtgccgagtccgagcgcccaggctgacgtgatttccggcgcgcttgaaaaatcaggaatacatccgcggatgatcagctgtatcgaagcccacggcacgggcactgaactcggagatccgatcgaaattgacggtttgacccgcgcatttcaaacgaaaacgtcagataaaggcttttgcgccatcagctcagttaaatccaatatcgggcatttggaagccgcggcaggcattgccggtgtaacaaaactgctgctccagtttcaaaaacgaaagctggccccttcattacattgccgaagcttgaatccgaatattgcatttgaccggacgccgtttgcggtgcagcgtgaattggcagactggaaacggccggtcattgaggaaaacggagcgcagaaagagattccgagaatcgcgggaatctcttcttttggcgcgggcggggcaaatgcccacatattgatagaagaatatattgaacctgatagggagatttctgagccattcacagatgaagatcccgcagtcattttattatccgccaaacaggaggccagcctgaagcagcgggcgcagcagcttcttcaagcgatcagaaaaaatgacgtcacagaccgcagcctccgggatgcggcttacacccttcaaaccggaagagaagcgatggaagaacgtgcggcgtttatcgtgacgtcgacagagcagttagcggaaaaactgcagtgttttattgacggcggaacagacggctgcttcaggggaaaaagcaaacagtataaagatattctagccgtttttaaggatgaagatatgcaggaagccgtccgtaaatggatgaaaagaaaaaaattcgcgaagcttctggaactttgggtaaaagggctgaagattgattggtcagagctttataacggcagcctgccgcatcgcgtcagccttcccggttatccatttataaaggatcgttattggccggacgatgcagcgccggacaatgttcgcggtgctgaaacacattctgaaacatttcgtgaattccgctttttacagaaaagctgggcagaaagcagccgtgttccggctaaggaagtgcggggcgtcatcggaatagccgctgatcaccagacaggaaatttggccgttgagctgtcccgttatttccccgagtctgaaatcattgacgctgcatcaccggaaatatccggggacgcggcccggtttggcggtctgattgatgtgacgggatgcgggacggaaatcaagcatgatgacggctggattcatcgtctgcagtctctcatcgacaacagaaaccgcggccgaaagctacagctgctttgtgtgacaaaggggcttgaaccttttgcgaatgaaacgataaatctctcaggtgcaaaaaaggccggattgtaccggatgctccaaagtgagtataaggatatccgctcgcggcatatggatgcagaacggactgccgaagattccgagctggcaaaccagatcgcagaggagttttttcgcgattctgcagacatcgaagtgtgttaccgaaacggtgtgcgctatcacgcgcggttaaaggaaacaaacagcttagctgaaaaagaattttcatttccgaaagaccatgcgctctggatcaccggagggacccggggactcggatatttattcgcccggcattttgccgaacgttacggagtcacgaaactcgtgcttaccggaaaagaaacaatgcctccgaaagcggagtgggatgatcatatcaaacggaattccccgttttccgataaagtgagaagaatcagagagctcgaacaaaaaggtgtccgaacggaagtgctgtctgtatcttccggccctgaatatgagcaggccgtcagccgggtgaaagagaagatgggaccgattggaggcgtgatacacgcagcgggagccgtagatctcgatcatcccgcctttatccgcaaaacaagagaacagatgatgactgtgcttgaacctaaaactgacggactggaccttttgtatcaagcgctgcacaaggagcctctccggttttttgcgctgttttcttcagtgtccggcgtgatgccggaattaggagcgggacaaagcgattatgccatggctaacgcctatatggattattttgcggccgcaaaaggttttccggtgctgagcatccaatggccgagctggaaagaaacgggtatgggcgaatcaaaaagccgggcctatcagaaaagcggtttaaagagcatcactgacagagatgggctgagcctgtttgatgccgttatggcaggcgattgcggatctgttattatgccggccgtcattcacccggaaaaatgggagcccgaccgtctgatgctttcaaccggccttaccgaaacaaagcagcatgtacagggtgagacagaaagcgtagaggagtggctgacgggcatttgctgccgggaattaagactggagccgtcaagatttgaatctgatacaccgtttcaagattacggagccgattctatcatgcttgcccaagtgtccagagcgatcggaaagaggatcaaagctgaccttgacccggcggtgctgtatgaataccctacggttgctgcgctggcgggatggcttgaaacggcatatccggaaatcaaagctgccgtttcaaaaccggttcagcctgtaatcccggacgttcccaaacaaacagcagccgctgtcattcagccttctggcgctgcagcggcgcaagacatcgctgttgtcggaatgtcctgccgttttcctggagctgaatcaattgaagcttattggaagctgctgtctgaagggtcgtcggctattcaaagggtgccgaaagaacgctggaaaacggagaaggcggattatgcgggccttttaaaaaatgtaacgcattttgacccggagtttttccttattcccgaagaagacatcaaggcaatggatatccagtcctttcttatattagaagaggcgcttcatctgttcagagacagcggttactctttacaagaaatgaaaggcaggtcagccggtgtctatttaggaggacgcggcggcagtatgcctgacgaaaaccgtctgaagcatgcaaaaaatccgatagtcgccgccggcccgaattacttggcggccaatctttctcagttctttgatttgaaggggccgagtctcgttttggatacggcctgttcttcagcgcttgtcggtatgaatatggcgatacaggcgctttcttgcggtgaaatcgactcagcggtggtcgggggagtcagtctgctggaatccggtcaaacccaccggatgttcgaacttcgcaatctgttaagcgaagagcctgcgtttcatatttttgaccgccgcaccggaggcatcgtattgggagaaggcgtcggaatggtgtatttaaaaacagcggcccaggctgtaaaagacggggaccggattcatgcggtcattaaaggcatttccgtaaacaatgacggcagaaccgcggggcctgccacaccgaatatacaggcgcagaaagaagtgatggccaaggcgcttgccaaaagcggcagaaaagcggaggatatcagctacattgaagcaaacggttcaggctctgaagtaaccgaccttttggaactgagggcgattgaagcggtgtaccgtatgcaaaacagcgcgccttgcgaattggggtcgatgaagccgaatatcggacacccgttatgcgctgaagggattgccggattcattaaaacagtgcttatgctctcgcgccgaatgcgtgtgcctttcctttcgggcaaagagccgatgacgcattacgatctgtccgcctcgccgttttatttttcgcacgttctgcgtgaatggacggattcaccgcggattgccgccgtcagcagtttcgctgacggagggacgaatgcccatgtcatagtggaagcctgggagcaggaggcgtataccccggttagaaagcctttgccgagacaggaattaaaacgccggcccatccgtccggacaaagctgaaaacctgcatgaaaacgcacatgaatcccgcccgaatacgttttggaaacaaatgaagacttactgattgcgctgaaaattgaacgtcgatatggaggaagttcatatgcaagagcagcttcttattaacaatcagcatcccgttctgaaacatcataaagcctatggaaaggaactgctgccgggtctggcttatattgacctgatctatcagactttcagagaaaacggtttttttcatgccggccttgaactcaggcacttatcgatttttcaccctttagctcctgaacagggagaaacaatcctgctttccgttgactgtacagagaacggcgaagggcagtggaaggtagaggtgaaagggcaaaaacaaggtgacgaagcagcagagacaaagatatatgccgcggcgcaaatgcattccgtcaagcccgccggcttccaagagagcgtccggatggatgccgtaaaacaaacggcggcagaaataccgcttgaggatatttacgcggaatgcagggatcaagaactggttcattcaggaatgatgaaaggctgcggaagcgtctaccagactgaaaaagagatttatattgatctgtcggtgcaaaaggatcagctggaacatgcagaagaggcgatgtttcatcccgcattgatagatgcgagcagcatcggctccaatgtatatctcgctcctttgacgagggaggaggggcaattatttctgccgctgttttatgaatcattttattgcgccgaattgctgcagacgacatgtatcaccaagataaaaaaagaatccgtcacacgtaagaaagatctcgtttacgtgacaatggagtttttcaatgaggaaggcagaaaagtcggcgaactgaaaaacttcgccaataaacgggtgagggacccggaactgatcaatcagaaacggcaaaagaaagaacctgacgggcggaatgccgtcccggctccgcaagcggaaccggcgccttccgagccccgccgtgcggaggcttccgccggccttactgaacagtgcatcctttatttaaaagaattgcttgccgcccgattgaacaaacctgtgaaagagattgacccggatatcggctactatgaaatggggctggattctccggggctgttggacatggtaaaggaaattgaacgaaaaatcggaacgcagcttctgccgacgctgttatttgaatacacgacaatcgcggaattggcgggatatttgcgcgaacattacggagccggcttcggccatgctcaaagcgggcatccaaatgctgaacctttgcgccgggaaaaaaagaggacgacccaaaaccgcgtgaaaaaatcggcgtcagccggaacgcagaatggagatattgcgatcgtcgggatggcgggacggtaccccggcgccaaaaatcttcgtgaattctgggcaaatttaaaaaatggagaaaacagcgtaacggaagtgcctcgttcccgctgggatacgaggaaatatgagcatttgcgatcgccgtccggcaagccgatttccaaatggggcggttttatagacgatccggattgttttgatgcgaaatttttccggatttctccgcgggaggcagaagctaaagatccgcaagaacgattgtttttagaaacatgctgggaaacgattgaggatgcaggctataccccggaaacaatcgttcagccgaaagggccgaataagagaatgaacgtcggtgtgtttgccggggtgatgcatatggattattctctcgccggcgctgaagctgcggccaaagggctggtctttccttatcccttgaactatgcgccgatcgcaaaccgggtttcatatttctgcaattttcacgggccgagcatggcggttgacacggtgtgttcgtcatctctgacggccgtccatatggcggcggaaagtctgagacgcggtgaatgtgaagcagctcttgccggaggcgtcaatttatcattgcacccgacaaaatatatcacatacggcttgatggatatgcattcgagtgacgggctgtgccgcacgttcggcgaaggcggcacaggctatgtctcagctgacggcatcggggccgtgctgctgaagccgcttcacaaagccgaagaagataaggatcatatttatgcggtgataaaaggcagcgccgtcaatcacgtgggaaccgtcagcgggattaccgtgccgagcccagtggcgcagggggatatgatagctgaatgtcttgaaaagacggggatcgatcccaggacgatttcttatgtggaagcgcatggaaccggaacttctttaggagatccgattgaaatacaaggtcttgttaaagcttaccgcacgtttacggaggatcggcaattttgtgcgatcggttccgttaaatcgaatatcggacatgcggagtcagccgccggaatcagcgggcttcataaaacggttttgcagctgtttcacaaaacgcttgtcccttctttgcactcagagacgattaatccgtatctccgtttagaggactcgccattttacgtgcagcaaaaaaccgagtcatggaaaaagccggcgtatacagagaacggcagagaacattcctgtccgagacgcgcaggcatcagttcattcggggcgacgggttcaaacgttcatctcattttagaagagtacaggcccaaaaaccccggcattacggagaatcaagagagaccgtatatcgtgcctctatcagcgaaaaatccggagcggctgaaggaatacgctgcccgcctgctgatgtttctcaaagataaagcgcttgaaggaagcgggtcgctttatgacaaaacagatacaatgcaaaatcagctggaaaatgcgctgcgcggtgctctggcggaagttctgcatgtagaggccggctcggtagatggtgaacaggattggaaggaattcggcttggatgtcatgcagctgacacagttttctgagcggctgacggatcaatacgggctggcaatagacatgactgatctcatacagcatacttccgtccggactttagcagaatgtctgacaaacgatgagaaacataagaatattctttccggtcttttcggtcagtccggcttagagaagcagtctgatgaacctttttccctgcggtcactggcgtatacgctgcaaacgggacggctggcaatggaagaacggcttgtttttttagtgaacgatcaagcggacctgatcaggaaattaaccgaatttacagaacgaaaacggcagattgacggctgctttcaaggccggtctgatagcggaacggaaatcaggggtttcctgaatgatgatcaggatacggaggagctgatccgaaaatggacggacagcggcacttacaaaaaacttgcggagctgtggtcaaaaggatttgagatagactggacgcggctgtatcgggaggagaaaccgcgcaggatgagtctgccgacatatccgtttgcgaaggagcgctattggataccggagcccgatcatcccgtcacttccgtaaatacagaaagcaggcttcacccgctgcttcaccgcaatacatcagatttgttagaacaaaaattcagcacggtactgaacggagatgaattcttcttagccgatcatatcgtccgaaacaagcgtgttctccccggggcggcttatcttgaaatggcgagagccgcggctgaactggctgccgcgccgttagccgctgaatacacggctaaaaccggcatttcgctgcggtatatcagctggatacgccaggccgttcataaaaaagagccgctgcgtatgacgacaggtctttccttagaggataacggcaatatttcatttcaagtgtacagcaatgaaaacgattcagacatttattgtgaaggcagtgctgtgattgagccgctgtctgaggcggcggttttgcatattgaacagctgaaagcgcgctgccgcaaaaaagtgctgtcaaaagaagactgctatgcggcatttgcaaaggcggaaattgtatacggaccttcacatcaaggaattgatcacatttattgcggggaaaaagaagccttggctaaattggtgctccctgcttccgtttgtgatgaggccgaacagtttgtgctccatccgagtctgattgattccgcttttcaggcggccatcggcgttatgaatgaagataaagcgggttatccggagcagccgttaatgccttttgaattgcatgaactgaccgtttttcatccgtgcagtccaaacatgtgggcggccgtatttgtgacgcatgaaacacgggccgtgcgaagaatggacattgatatatgtgatgaacgcggcaatgtgtgtgtaagaataaaaggattttctgcccggatggccgaaagtgcgccggccgtaaccgataataagcaatacgatctgccgggtaaccttaccggagccgtcaaactgatgcaggtatgggacgcggaaccgatagacaaccaaaccggcttccccatttctgaagcaaaagctgtcatcataggcggtacagacgggcaggcggacgcggttttacgattgtttcctaaagctgtgcgatttgatagcagccaaagtgcttccgttgaagtgatatccgatcggctccgccgtgtcggtgagattcagcatatgatctggtttgcccctcagccggctgattcttacatccatgatcaaaaaagcggggtgctgcaaattttcagagcggccaaagctcttatcggtctcgggtatggaaaagagcagctcgggatgacggtgattacgcaccaagcacagcctatcacccaatatgatgaggtgcgtcccgctcattccagtgtgcacggtttcgtcgggtctctcgcaaaagaacatccgagctggcacatccgtctggtcgatcttgaagacgggggggatttccctgcagaagacatattcagcctgccccgcgaccgtacgggtaaagcatgggtgcgcagacatcaggaatggcaccggcctcaattgcttccggtccaaagcgggccgtctgaaagtgttccttaccgatatggaggcgtatatgtcatcatcggcggtgcgggaggcatcggcgaggtttggacagattatatggtgacggcgtataaagcccgagtcgtctggatcgggaggcggccgctggacagccggatacgccaaaaaatagaccggtaccggccatcaggcccggctcccgaatatatagcagcagatgcttctgatcttccatcgcttcagcgcgcctatgaacagattaaaaacacatacggcaccatcagcggcgtcgttcattcagcgatggtatttgcgaatgaaagcgtaaaagatatggaagaatcacagtttcacgccggccttgcggcgaaagtggatatttccgtcaacattgccgaagtatttgcgaaagagtctttggactttattctctttttctcttcggttatttcatatattaagaatccgaatcaaagtcattatgcggcggggtgcgcatttaaagacgcatttgcccatgagctttccgggcggctgtcatgcccggtcaaagtgatgaactgggggtattgggagcgggctgacaatcacatttctgaagagtttgacagactgagtgcaatcggtctcggactgatcagccgggcggaagggatgcaggcgctggaaactctgctgacgcagccgatctcccgcatggggctgatgaagctgaccaagccgattccgatcgagggaatgaaccctcatgaatttgtgactatctgattgcctgtcaaaatgacggagcaaatttaattttcttaggaggataaggttttgggtaagggagacaaacaaaaagaccgtacacagttatccttaagaacagaaataagcaatcaaatgaaagaattgaatcagcttttgctgcaagtgctgcgggtgacgctgcgttcaatgggtctgaccggcgaagcgccggcggcttcctgtctgcctttatatgagcgctggctggaagaaagcatccgtcttttagacagcgatcttaaaagcggtgaaacggccgcgatttgggaagagtggcataagaagaaaaacgaatggctgaaagatccggatatgaaagcgcaggctctgctggcggataccgtcattcaagctttgcctgacattttaacaggcaaaataaaagccactgacgtgatgtttcccgattcttcaatggagctcgttgaaggaatctataagcataacattctcgctgattattacaacgatgtgatggcaaatgaagcgtgtatttatgtggaaaatgtaattaaaaacaatcctgaggcaaacatccgtctgctggagatcggagcgggcaccggcggaacgagcagcacactgtttaaaaagctccgcccctatcaaaaccatattcaggaatactgttataccgacttgtcaaaagcttttttaatgcatgccgaaaaggaatacggcgcggacaatccgtatttgacgtatcagctgtttaatgtggagaagcctgcggcgggccagggattacatctgagaacctacgatatcgctatcgccgcaaacgtgctgcatgccaccaaaaatatccggaaaaccttacggacggcaaaagccgtattgaaaaaagacggtttgctgctcgttaatgaactgggcggacatacgccgtttacacatgttacattcggcttattagagggctggtggctgtacgaagacgaggcgctgcggattccggggtgccccggtctttatccggaaacatggaaatcggttttaatggctgaaggctttcattccattcaatttccggctgaaaacgaacgtctgcacacccagcagattatcacggcgaaaagcaacggagtcatcaggcagagcagggaagcttacaccgcgcaaaagcgccaatcaaacgtaccgcgaacattctctgatcgtcagctccccatcaaacaagcgggagaagggctttcggaaaagacagctgcttttctgataagggctgcggcaaaagtattaaaaatgccggcagaagagataaatccgctggctcctctggatgaatacggtattgactctattctgatcgttcagctgacgaacgagctgcgggatctcgtccctgatatcagcagcacgctgttttttgaacaccgaacgatagaagagcttgccgcatacttggctgaaacgaaggagcgcgaactgcttgcgcgattttctgaagaagtccgtcatactgaagcggtatcatcaggctctttgcttgaaaaaagcacagagtatctgaaacagatcgtcagcgtcatcttaaagatgccgattgaggacgttcaagcccatacgccccttgaagaatacggaattgattccatcttaatcgtacagctgaccaaccgcgtgcgggaagacgtccctgatatcagcagcacattgttcttcgagtatccgacaatcggcggattagcggaatatctcgtcagctcaagacaggaagatatggctgggattttcaagacaaataaagaagccgaaaaggtgccgcacactctacagaaaaagcaaagccgcaaaaaaagcgccggattgacgaagcgccaagcggcatctttttctgaaaaagcgccgcccgcctccgaaccgccgtcaaaacaccttgaagtggcaattgtcggtcttgccgggaagtatcccggagctgaaaatgttaatgagttctgggaacggttaaaaaccggtgaacacggaatcaccgaaattccgaaagaccgctgggattggcgggactactatgatgagacaaaaggtaaggaaggccggatgtatacaaagtggggcggctttttaacagacattgataaatttgatccgctgttttttaaaatctccccgaaagaagcggagcgcatggacccgcaggagagactgtttctggaaaccgcttatgcggcccttgaggatgccggatatacccctgattcactatgcgccggtaaaaaggttggtgtttttgcgggtgtcatgaacggcaactatccgacaggggcccactaccactttatcccgaaccgcgtatcctatgtgtttgattttcacggtccgagcatcgcggtcgataccgcatgctcctcatccttaaccgccattcatctcgccgcagaaagcatcagaacaggtgcatctgaatgcgcgattgccggcggcgtaaacctgattacagatccggttcattatatcggactgtcttctatgagaatgctgtcgccgtcaaacgcgtgcaaagcgttcggtgataaggctgacgggtttgttgacggagagggcgtcggctgtatcgtgttaaagccgttgaagaaggctgttgaagatcatgatcatatatacggtgtcattaaaggaagcgctctgaacgccggcggcaaaacgaacgggttcaccgttccgaatccgaatgcacaaggggaagtgatcgcagacgcgatggagcgggcaggaattgacccgagagcgatcagctatctggaagcccacggcaccggcacttccttgggagatccgattgaagtcgcggggttaaccaaggctttccgccgctatacggatgcaaagcaattttgttccatcggttctgttaaatccaatatcggacacctggaaagtgcggcgggcattgctgccgtcaccaaaattcttcttcagatgaaacacggatatctggtgccgtcgctgcattcaaagcagctgaacccggaaattgattttgaaacttctccttttatcgtgcagcaggaaacggcggaatggagacggccggtcatagaatctgaaggagtaacacgggaatatccgagaatcgcgggtacatcttctttcggagcgggcggggcaaatgcccatctgctgatagaagagtatgaaccggctgaaatgacttcggcggactccggccgtccggcgctttttgttttatcggcaaaagataaagaccgcttgcgcgagcgggctctgttgctgtcggatgccgccggaaacggaacaattacagatgcaaatctgcttgacgcggcatttacccttcaagtcggcagggttcagatggaagaacggctggcgatgacagcggactctgtttctgaattggaacagaagctgactgcttttctgaataatgccgattccgtaagcggggtgtttacgggccggagtgatagtgctgtcacagagacggaaggcacagtcggtgattggatggaaaaacgtcaatttggcagtcttttgaatgcctgggtccacggggcgcccgtcgattgggcatctttatataaaggcgcgctgccgcatcgtatcagtctgccgtcttatccatttgcaaaagaaagctactggatgaagcgggaagaaccaaaaacaggaacaactgaatatgtgcatcctttcctgcatgaaaatacgtcaaccttggcggagcaaagctatcatacatcttttacaggccgggaacacgttttccaggatgtgagaggagagcgggttctgtcggcagccgtttatttagaaatggcgcttgcggcttatcatcatgcggcagacagctctgaagaaaaagagatatggatccgaacggcggcatggactgacccgattaccggcggacatcacggtgcgggcgtcaatctctcccttctgtctgaagacgaggaaggcatccattatgaaatatacagtgatgaagagaagctgcatcattatggaatcatcggtcaagggaacgtacagccatcccgcatgcttgatattgcctccttacaaaaagactgtcgcccgctgtcattcgattatgaaacaccaggcacatcaggtgtaacgatcagtaaggagttccgcaccgttgaaaagctttatacgggagaaaatgcgatttgggcgaagcttgctcttacagatgaaagcggccgtaatccgggatatcatctaccgccggaatttctggacgcagcttttcatgtcttggcaaaaacggagccgtcagtccatatcgtgcctgaaacggttgaagaactgcgcgtcatgcgtccgtgttcatccggcatgtggatgtatatgaataaaaagaatcaaaccggctgtgacattcaattttgtgacgaaaccggcattgtatgcgcagaaatcaaaggggtgagaatgagacagccgtctcagcaggatcacgggcaagaggaacactccgagatgatgatatttgaagaaaggtggacgcagcagcctctgaagaaatccattcatgaagagctgaaaacggtcatctgttttcttacgggagaagctgccagaaaacatgcttatcggtctttacaatccctttatccgggagccggcgtgttttttatttcacagggtgaggaaactcaaaagctttcaaacacgcattatcaaattaaaatcactgacggacaagcatatcaagaaacgtttcggcatattgaaacggctgcaggcaaggcggatgccgttttgtatggatggccgcttgaagatgaaaaggccgtgaaagactattccattctgtatcatgtgatccgcgcagctgcttctttgcgttctaaaccgaggcggatccttctttccgctcagtgcgggaccgaaaccgatatcagttacgccgagtcatggatcgggctggaacggtcgctgaaactgatcctgccggagacggatacggccgcggtttattttggacaaagaggaccgtttgaaaagctgatccataatgtatgtgaagagcttcacagcgggtcgttccgcagtgtcatgtacagtggggaaatccgtcacgtcatggaaatgaagcagacggatattgcccctgttgagaggcgtgtgataaaaagcggaaaaacgtacttgattaccggcggatgcggaggtttgggcttgttatttgccggatattttgctgaaaaaggaccggttacgctcattttgacggggagatcagcggcaggcggcccggtgctgcacaagataaagagattggaagaatcaggcgccaaggtgttttacgtgcaggcggatgccgcagatcaggctcagatggagaaaggtttgcaagaagcgaaagagaaaggatgcgggccgattcacggtgtcattcacgctgcaggtcttcaaggcactgaaagcattctggagaaagatctgcaaacctttcagcaagtcttatcgccaaaaacggacggcacagcggtgttagatcaggttctgtcacgggagccgcttgacttcttctgttgtttctcttcttcttcagcgattttaggagacttcggttcttgtgactacgcaatggggaaccgcttccaaatggcttttatccgccaccgggataaacttgtgagcctcggactcagaagcggcaagtcacttgcaatcaattggccgctttggaaagaaggggggatgcatgtcggcacggcggaaagcaccgatatgtatttaaaatcaagcggacagcgttatttatatacaaaggaaggactcgaagcttttgaaacattgttagtccagccgtccagccagtatctcgtcctggccggttttccgtcgagggccaaacgcttcctgcagatagatcaaggcgaacggccgatttcgggttctgtaaataggaacgtcccgttttcaggaaggcggagtgaaatgaaaggctttacactggaagaatgcgtaagctgggatgtgaaggaactggcggcggggcttttgaaaatagacaagaacagactgacggatgctgacaatctggctgatttcggctttgattctatcagtttggcggaattcgcctcttctttgtccgctcactacggaattgaagtgaccccggccctgtttttcggacattccacactggagaaggtcgtccgctattttctgacggaacacaagtccgtcatagagcatgtctatgaagaaaagaaacctgaatccgcagatcaatctgtctttgaaaaggcaggaacggaaaagcgaaagaagcagaggggaagaaataagctgaacgccggaaccgagggcagtcaggcagctgattccattgccattatcggcatgagcggccgctttcctcaggcgcgcacggcggacgagctgtgggacattctgtttcaggaaaaggacgttgtcgcaccggtcgcaaaaaaaggcttcacaagttcaaaatggaaactcggcgctgtaccgggggcggacgaattcgaccctttattttttgaaatatcgccgagggaagctgaaacgatggatccgaagcagcggctgctacttcaggaagcgtggcgggcccttgaggatgccggctacggcgccagtcacatcaggcagcagacgatcggtatgtttgtgggtgcggaagaaggagattatcaccttttaacacgggacaaaggcaatgtcacgtctcatcataacggtattttggcggcgcggctggcttatcacttgaatttatcaggtcctgtgatggcgataaatacagcatgttcttcggggctcgtttctgtccatcaggcggtattaagcctgcagaataaagagtgtacaacagctgttgcggccggggtgaatatcatgaataccccggacttttttgaaacgatagataaagccggaatgctgtcggaaaacgggaaatgcttcgcgtttgataaaagggctgacggcctggttcccggggaagcggctgcggcggttgttcttaagccgctgagagaggcggaagaagatggcgatccgatttacggggtgattcgggcgagcggcatcaattatgacgggaaaacaaacggaattaccgctcctagcggcgtcgcgcagacccggctgcttacttccgtttatgaccggggccgtatcaaccctgaagatatcgaatatatcgtcacacacggcacgggtacaaaactcggtgatccggtggaaattaacgcgctttatgacgcattttctgcctatacaaacgaagaagcattttgcgcgctcacatcaattaaaaccaatatcggccacacgtttgccgcgtcaggcattgtcagtttgatcagtcttttacaggcattctcccgtgaaatgattcccgccagtctgcattgcagcggggaaaaccgctatatcaactgggagaaaagtcctttttatgtgaataaaacggctaaagcgtggccttctctgccgggtaaaaaccgaatgggggcagtcagcgcattcgggatgagcggaacaaacgcccatgtcgttatggaaagctataagcgcagcgcttcacctcatccggatgcccctgcttatttactgactttatcagcaaaaacaaaggaggcccttcaggaaaaaatcgaagatatgatcacttgggcggaaaatggcggactgaaagaaaatgatctagcccagctcagctatacgttgctaaaaggacggcatcactttaaccatcgcgccgccatcgtggttcaagatgctgatgacgcagtgtatgtatggaagcaggcaaagcttaatgaacatcatccttatgtgttttcgggaaaagtaccgcagcactttgcaggccgacagcatattcaggagcacataatagaagtgctcggcaagtgcagcgcttcatattctgaccatagaaaatatcaggaactgttatgcgtgctggcagatttttattgtcaaggttatgaaattgaaggggacttgctttatggcggacctttgccgcgaatcggcaatctgccgggctacccgtttgccaggcagacgtattgggcgtccgatcgtcttcagggagagcttgaaagccggaattcagctgaacgtgaaaagcttcacccgctgctccatgcgaatacatcgacctttaccgcccagcgctttacttctgttttttcagggcgtgaaccgttttttgccgatcacatcgtcaatggaaaaccggtgcttccgggcgcggctgctttagaaatggcccgggccgccgttacacttgccgctgagggcttgccgggcggaaaagcgggtgtccggctcaaacagatcgtttggctccgtccggtgacggcgctttctgaaggcgtgacgcttcatgtaaaacttcagccggaagaaaacggagacatcgcttttgaagcgtatgccgaaggagaagagccgcttgtctttttccagggaaaggccgtgctcgaagagacggagcgtgctccggtactcgatgtggaggcggttcaggcgcgctgcggcggccggcacatgtcaaaggctgagtgttatgaagcattcgacagcctcggcatcacctacggaccgtctcatcaggcgcttgacgccgtctatgccggaagcggagaagtgctcgcgaagctcactcttccgccgtccgcccgcgaagaaaaggagccgttcttcctgcacccgagcatgctggacgccgcccttcaggcttctatcggtctcgtgctctcagacggttccgcgtccggacggccgtttctgccgtttgccctccgggatatgcaggtgttttctgcgtgccgggagacgatgtgggcggtgctttcctcagcggacggcgcctatcatattgagctgtgtgatgaaaacggcgaggtatgcgtccgattgacggggctcaccgcccgttttctggaagaggaaacggagggaaaaccgctcttgcttcagccaaagtggcaggaatcaccgccgggtgaaggcggcggacaagcagagtctttcagatacgtgacgctgtatggcggaatgaacgctgaggacataaacggcgccgtatgtgcggctgacggggaaggtccgattgaagaccgttatgacgcctgcgcggcggagctgtcagcgatcgtcaagcgtcttatcaaagaaaaacagaagggaaaaacgctgatccagcttcttgtccccgacaggggggaagacaatgtattggcggggctggccgctttcctgaaaacggctcaccttgaacatccgaagctgtacggccaagtcatccaagccgatccggacgagccagcatcatcgcttcttgccaagctgaaagaaaaccggacgcaccctgaacaagcggaaatccgttatgaagccggcaaacgtctcgtcagaaactggcgtcacctgcctgcgcttcaaagcggcgccgttccgtggaaagacgaaggggtttacctcctcaccgggggagcgggcggcatcgggctgattttcgctgaagaaatagcctcccgcgtcaaaaacgccgtcctcatattaacgggaagggcggaagcgcttgataaagaccgctccgcccgcttacggcgcttggaagcgtcgggtgcccgcgtactgtatcaaccggttgatgtgacagacagggcggcggtcatcgccctcgtccgcggcatacaggaggagcacggaacactcgacgggatcattcacggcgccggcgtgatcgccgacaattacattctgaaccagacagaaaacgaacggaagaccgtcatggcgccgaaggtgaaagggcttatcaatcttgatgaagcagcgaaagatgcgcggctggactttttcattctgttttcttccttggcgggaggtatgggaaacccggggcaggccggttatgcggcagccaacgcatttatggacgtatatgcagcccgccgaaatcgtctcgtgcgggacaacaagcggagcgggcagaccctgtccgtcaactggccgctttgggaagagggcggtatgcgcgtggacaaagagaccgaacggctgatgtatgaacagaccggaatgaaagccatgcgatcggcttcaggcatccaggcgctttacgccgcttttgcctccggagaacaccagatcatggtggcagaaggagatgaaaaacggattcgcagccatgttttcgatctgcgtgaagaacaaagcgccgccgcaaaagctccggcagagacagatgcaggagatctgaaagatcgggttcaagagaaactaaagcgtcatgtatcagatcttttaaaggtaagcatgaaagatattgaggctgacagcgaactgacggaatacggatttgattcgatcatcttcactgaatttacaaatctattaaatcggtcttatcagcttgagctcagcccgactatcttctttgaatttccgacattgcgcaaactgagcggccatttgatatctgaatggaaagaagcattcagcggcttagaaagagagaattttaaaaccgccccaaaagccggaataagaaaagctgaagctccggcggccgttcatgtcaaacgggaaacgcccgtatccgtaaaaggaaaatcagaagaaaaaaccgaaccgatagccattatcggaatcagcggtatttttccgcaagcgaaagacatagatgaattctggacacgtttatcaaaaggagagcattgcatcacagaaattccccgggatcgctggaattggcgcgaatattacggcgatccggcagcggatgcaaataaaacgtcaattaaatggggcggttttatagatggaatcgccgggtttgacccgctgtttttcgggatatctccgaaagaagctgaaatgatggatcctcagcagcgcctattaatgatgtatgtgtggaaagccattgaagacgcggggtactcggcaaaacggattgccggaacaaaaaccggcattttcaccggcacattgggaagcggatatcaaaccttaatcaataaggcgggtcttcctgtcgaggggtatacgatgaccggaatcgtgccgtccgtcgggccgaaccgaatgagttattttcttgatatccacgggccgagcgagccgatagaaaccgcttgttcaagctctttagtcgccattcaccgcgcggtaaaagccattgaaacgggagattgtgatatggcggtcgcaggaggcgtcaacacgatcgtcacgccagaagggcatatcggttttcaaaaagcaggcatgctcagtgaagacgggcgctgcaaaacattttctgatcaggctgacggttatgtcagaggagagggtgccggcatgattgtcttgaaaaagctttcagaggctgagcatgacagggatcacatctacggcctcatccgcggtacagcggaaaatcacggcggacgctcagcgtcacttaccgcgccgaacccgcaggctcagacggatgtgctgaaaagcgcttatcaaaaagccggtattcagccgtcaacgatcacttatatagaagcgcacggaacaggtacggcgctcggagatccgattgaaatcaatgcattgaaaaaagctttccaaacagacggggctccgggcggatattgcgggattggctcagtgaagacaaatatcggacatttggagctcgcagcaggcattgcgggcgttatcaaagtattgatgcagctgaaacatcggacgctcgccaaaagtctgcattgcgagaacatcaatccccatatcaaattgaaggacagcccgttttacattgtgacagaaacaaaggagtgggaagcgctgcgtgatgaaaacggccgggtcctgccccgccgggcgggtgtaagctcattcggtttcggaggcgtcaatgcgcatatcgttattgaagaatacatgggcaaaagtgagacggaacagccggaaacccgtgagaaagcgtcatctctttttgttttgtcggctaaaaatgaagagcggctgaaagaaagagcgcgtctccttcgcgattttatccaaaacggatcatcccgccatatcgatcttgcagatgttgcatacacactgcagaccggacgggacgcaatggaagcgaggctgggaatcattgcaggctccgcagaggaactgactgaaaaactgaacgcgtttctgacgggaaaaaacagcgaagatatcatcagcggccgtaaaaaacgcgagaataacacgatctccatgttctcagacgatgaagacgcagctgacctcgtcagcgcctggattgagaaaaagaaatacaagaaagtgctgcggctctgggtaaacggatttgacacagattgggagcagctgtatacggacagtaagcctcgccgcatcagcctgccctcctatccgttcagagcagaccgctattgggtgccgaaacgggagcagctgccgctttcgaatcaaaaaacagtagtattgcagaaaacatgggagccttgcgaggcagtgtcttcatccgagccattcagcaaaatagcgctcatcgtctccgaggatacaaaagaccttgccgccgaggtgaaaaaacagctgaatgatgctgacattgtgcaggaaaatcagctcatctctttcttacaggatgcgaatgcggccatctattccgggtttattgacttcaccggctgcggctcccgacaaaagcggcaggacatcagctgggtggcatcgctgcagcagctgattgaatacggccgcggaaaagaaaacatgaaaatgctttatcttacaaaaggccttgaatccttcaaaaataatgcggccgctatgcatggtattgaaaaagcggggctttatcgcatgctgcggcatgaatacagccatattctcacctgtcacgccgatattgatcctgaagagccgctggagcagacagccgcttttattaaacaagaaattgaatcagacttaacggaatctgctgtttgctacagggacggcatgcgcttcagctatgttcttcggcagactgatcagattgaaccagaagccgtgcaaacagaccggactgtgtttccaaaagacgccgtcctcatgataaccggaggaacgcgcggactcggcgctttatgcgccaagcatttcgtttccgcatacggtgtgaagaaactgcttctgacaggcagaaaggagctgccgccgaaaacagagtgggatcttgagcaaacagaccctgtcgtttcggaaaaaatacagcttatccgaaagctggaatcacagggcgtaaaagtgtgcgtctcagcagttgatctgacggataagcaggccgtcggacggcttataaaagaggtaaccacaacgctcggacctgtcggaggcattctgcattgcgcaggaattgcggaccgtgaaaaccctgcttttctccgcaaatccaaagacagtatcgcgcgggtgctcgcaccgaaagcagacggcctccgcggtctgtatgagagtgtaaaggatgatgcgccggcatttttcgtcctgttttcatctgtctcggcagccgtcccgattcttgcggcgggacagagcgattatgcgatggctaattcttatatggactattttgcagaaaacaatgagggcggcatcatgagcatacaatggccggcatgggatgagacgggcatgagcagggatacaaaaagcgggatgtatcagcaaacgggattgctgcgtcactctgacgcggaaggtctcaagatgcttgattacattttaagagaaagacccggaactgtcgtgctgccggcacaagtgaaaaatgattgggacatcaaagcgcttgaaaacgccaagccagccgcccataaaggaatgagaacagcttccaaacctcctgaaacaaaaaaacgggtccataaccggactgatattcaatcttggctgaagtcgcttttggcaaaagagctgagtatcgatgaaacgcatatggatatcgatgtgccttttcaggaatacggaatggattctatctttctggcgcaagtgctgacaaagatcgatcaaaaactgccgtccgtttcaattgatccgactgtccttctggaacaccctaccatagaacagctcgcggattatttagccgcacattgtccggaagctttttcggcagatgcagcggttcccgcggagaaggtccctttgcagaaaacgccgaaacagagcaaaaaaacggcagataagcccgggaaacggggaaaggttgcgatcatcggcatggcctgtcattttccggaagcgggggatataaaagaattttggaagaatctccgcagcggaacggatgccgtcactgaagttccgccggacagatggaacgccggggaacactatcagccgggtgaatatcaagaaggaaaaagcatcagtaaatggggcggttttattcatgatattgatcaatttgacccggagtattttaatatttcagaaacgctggcaccgatgatagacccgctgcaaaggcagtggctcgaagtgagcgcggaagctttggccgatgccggttatcaaaaagaggatctctggggccgccgtatcggcgtttttgccggtgcaagggcaggtgcgtttcatcagaaatttcaatatttgcaaaaagacgcgattattggcgcggggcaaaattttattaccgcacatatggcgcacatttataactttacagggcccaacctggtcgtagatacggcctgctccagttcgcttacggcaattcatttggccgtgcaggctattcaaaatggagaagcggaggcggcctttgcgggcggggttgacattttgcttgatgaaaaaccttttctcacaatgagcgcggcgagaatcttatcgccaaatggccgttcaaaatctttcgatgccgatgcggacggaacaggaatcggagagggctgcggtgtgctgatgctgaagccgctcgaaaaagcgatagaagacgaagataaaatatacggcgttattgacggctctgcgataaataatgacggcagcacaatgggggtgactacgccgaatccccgggcgcagcaggacttgattgagcaggcggttcaatcagcggaaatcgagccggacaccatgacatacgtagagacgcacggaaccggtactttgatcggcgacccgattgaattaaaaggattaaccaatgtcttgtctgcttattccgatgaaaaacaattttgcggtgtagggagcgtcaaaagcaatatcggccacttgctgagtgcggcgggcgcggcgggaatcatcaaagttttgctggcgattgccaatgaagaactgccgccgactttgcattgccataaaccgaacccccgctttcaatttcatgattcgccgctttatcctgtgcttgagctgaagcggtgggacggaaaaaaagagatactcagggccggggtcagcgcgttcggtttgggcgggaataacgcccatatcattgtcagcaacgaaggaattccgaaagaacgaaaagcgaccatggaaccgaaaggcggccagacagtataccgaaaacagcggtattggcctgaaaaagcacagttgtccgaagcggaagaaaatgaggcgggcacagaagcaatgtttgaaataagcgaggtgtgatagattggcagttgccaccgatcaagtcaaaacgttcctgcagaaaatcagccatacgaattatatcgtccgggatcatcgcgttcaccaaatccgcgtcctcccgggcgtgactttaatagatatgctgtatcggctcgccgccgggtatctcggtgaaaggcctatagaattaagacagattatttttaagcagcctgttgtaacatctgaagagtttgataaacacctgtatgtcacctttacgccggcgcgtgacagctggaaagttgagattacaagcgaaaaagcaaaaaacggcacaccgcttggcggaaaacgggatgagaatatggaatgtcagctttatttgcaaaaagacacgccccgggcaaaagagctgaatattgaagcattcatgaaaaacgcaagccgaaaatgggacatgcatgacatttacggaattgcaagaagaagccatattgagcatggcgagtttatgaaaaatgaaggggccgtttatcagcttcaggataaagaagaattaatggagctcactctgagtgatttggctgaaggattccgggagaaattcaaggcgcatccggcttttttagatgcgtccacccttgccggctcttcctttgcattgtcggcccaaaagcagaatgacacaccgtatattccttttatgattaatcgtttttgcatatatcagccgtttccgaaaacgatttacacttattctgcggaaaacagccgcactgaaagcggcgcatcagatagcgaacctgatttttattcggccgacttcacgatttacgacagggaagggaacgtattggccgaatgtgagaaactgacagtaaaaagggtcagacaagcgaatatgattacccatctgatagacaaagagaagccgcctcagcagaacaaaaacggccgtggagagcccgaaagtcctgtggccgcagaagacgtgtctgaacagcaaacgccggaacaaaacatggtgacttacataaagtcggaaatcgccaggctgatcaatcgtccggcacaggatattgatgtgcggaaaggcttttatgatatggggcttgactcggcgcatttgctgaagcttgtaaagatattagagcagacttttcagcagcagttttatccgacactgctttttgaatattcatctgtccgccgccttgcggattaccttatcaatgaagcgggctgtgtgctgaaagattcggccgaagaacggcatacatcagacgctgacatcgctgatgaggttctgttttttgaacccgcctggaaagatcatccgctggaaacggcggtgcagaacgggcaaaaacacacccgtcatcttattattgctgccgatgcaggaccccgtctcaccggtgaactcggcacacattgcccggaagcggaagtgatagaactgaaaagggagcatgaggttgcagatgagcagtttggagcagatgccgagcttatatttcgtatgcttaaacgggaactgacagaccatccgaaagaacatacattgattcagcttgtatgcgccgttgagaatggagcggcattgtcttccgctctcggggctatgctgaaaacggcacatctggaaaatccggctcttcgcactcaggtgatcaccttctgtgacaagaatgagagattgccaagtgagacggccgcaatcattagaacagaagcagactgctctcatgcaggctgcacagacattcggtataaagacgatatgcggcagatcagattgttcgaacgtattgagaaaccgggcggacagacacagtctccttggaaacaaaacggcgtatatgtcattacaggaggtctcggcggtcttggatttctgcttgcccgtcaccttgcagaaaaagaaaaggtgaagctcgcactcatcgggcgttcgccggaacagtctgagaagatcagcagactgaaagcattgggagcggaagttctttacgttcaagcggacatcggcagcaaagccgaaacagagcgggcatttgctcagattacagaaactttcggccgtctgacgggcatttttcattgcgccggtgttttaaaagatcaatttatcatccaaaaagacagtactgacttgaagagggtgttcctgccgaaaatcagcggcctgattcatgcggacgaagcttcacggcatgaaccgcttgaatttttcgccgcattttcctcattctcggcgttgaccggaaatgcgggccagacagattatgccgcagcgaacgcttttatggatgaatatatgaaatatcgcgattgcaaagcggaaaaaggcgaacggaccggggcttctatgacgatcaactggccgctttgggaagatggcggcatgcaggttgacagtttgatgaaagagatcatgaatgatgcaaccggcaccagcccgcttccggccggggaagggatggcttcactagaatatatgctgcgtctcggcaagctgcaatccgttattttatacgggaaggagcctgctgtaactgaaagcatggcccgattggttccgatggcagacaagaaccgctcttcattatcccatgcagctgtcaagagaaggagccgaaaacaagagagacatacagaagagcacgatattgccgtaatcggattggcgggaagatatccgcaggcgggaagcatcgatgaattttaccaaaatctgcgctcaggtaaagactgtatcacaacaatgccgaaagacagatggaaaggttatcctttctcatatgaagcagatcagttctactgttacggaggatttttagatcgcatagacagctttgatccgctgtttttcaatctgactccgcgccaggctgaaatgatggacccgcaggcgcggctgtttttagagacggcttgggaagcttgtgaagatgccggtttttatcaggacagaacggcgcgcgggccatcttcacaaaaaagaaaacgcgtcggggtattcgcaggtgtgttttggagccattatgagctgttcggcgctgaaatcacacagcggggcacaccgctgtctatgggcgtgacgcctgcctccgttccgaatatcgtgtctcactgcctgaactttacagggccgtcaatggctgttgatacgatgtgctcttcttcgctcacatccatacatttggcatgtgaaagcattaaaaggggggagtgcgaattcgccattgccggcggtgttaatgcggtcacacatccgcataaatatgcgtttttggcgaatgccggatttctgtcttcagaaggcgtctgcaaaagcttcgccgacggcggtgacggctatgtgccgggagaaggcgtcggcgcggtgttgctgacaaccgttcaagaagcggaaaagatgggctgtccgatatatggcgtcataaaaggctccgctttaaaccatgtcggaaaaacatccggtttgaccgtgcctgatccggcatcacaggcggaagtcattacagattcctttcagagtgccggcattgatccggagacattgagctatattgaagctcacggaacgggtacgtctctgggtgatccgattgaaattgaagggctgagccgcgctttccgcaaatggacaaacaaaaagcggttttgcgccatcggctctgccaaatcaaatatcggccatttagaaggagccgccggaatcgccggattaacaaaggtgcttttgcagctgaagcatggagaaatctttccgtcattgcacgcggacacgctgaatccccatattccatttccggatacgccgttttatgtggcggaccggctggaagaatgggaacggccgtcacatcctgaccagccgagaagagcgggtttaagttcttttggcgccagcgggagcaatgcccattttgtcatagaagaatatctgccgccgcaggctgaaaagaaatcgctgagtatacgggaagacgagccggttctgtttctgctttcggcaaaaaatgaagaacggctattggaatatgtcaaacggtatgaccgctttttacgggaaaaagaagtcaatcttaaagacctggcctacacgcttcaagcgggcagagaagcgatgcctgaacggctggcattgatcgttacatccgtttgcggcctgcaagcgaaactgaaggatgtgcttgaacggaaaacggaaattgaagggtgtttccgcggacgtgctcaagatgttatttcaacaagtggaatggccgagcttttgaaaaacaagcaatattccagattgctcacggagtgggcaaaaggagccgccgttgactggagccagttatacgaaggagagaagccgaaacgggtcagccttcctgtatatccgttcgcgaaggagcggtattgggtgcctgtgcctgcggatatccggaaacagacagacgaaccggcggaaaaccaaaagatcattcttcaaaaagactggaagcagcaagatccggcggagtctgaagcattatcaggaacagtaatgatacttgcaactgataagacgagccgattggccgatgctctatttaaaggaaacggccatattgaaacgatctgtttcatccatcaggcaaaagacggcgccgattattacgctgccgcatcggggcgaaacctttacggcagagtgcgggagtctcttcaaaacaaacagatactcggggtcgtcgacataaccgcatatgatgcggaatatgaacggcgggaagagatagaatacggaaagcttgcctttttacagcaggttctggaatcattccgtcatagcggcgctgtgctcagccaagtgacacaccgcctccagcctttcaaggaaagtaaacctctgatgcagggggcgaaaacggcggggctgtaccggatgctgggcgctgagtatgccaacattcattcttttacgatagatagcgattgtgcgattgagcatacagaagaattaagcagacagattgaaactgaatttttacagccgcgggccaaaagcggcagtgaatgctgctacaggctgaatcgccgttatgtgccgtttctgaagccgggtacgaatgtgtctgcggtgcctgagctttcctattcgtctgatgatgtgctgttaataacgggcggatcgcgcgggatcggcgcaattgcggcggagcatgccgtttcacgcgggtgcagaaaactggtcatcatggggcgggagccgcttcccgattcctcggagtgggaagacatgaaaaaggacggcattctcccggaaaaagccgagcggatgcagaggttagccgagcggggcgcggagatccgttattacagcgtttctcttacggatcaaaaggggctccggaacatgacggacagcatccgcggcacaatgggaccgattaccggtgtttttcattgcgcgggtgcaatgggagaacaccccgctttttataacaaaaccgaaactgagatcgaaagcgtttgcacgccgaaagtaacagggcttggcggtctctatgaagccgttcggaatgagccgctgtcgttttttattttgttctcatccgtttcgggtctgatcccttcgcttgctgcggggcaaagtgactacgcgatggctaattcatttatggactcttttgcaaatcatcaggcaggcaaaggaaacgtgtttgttaaagccgttcaatggcccgtctggaaagaaaccggcatggctgaaggcctgccggaaacacctgcttatcaaaaatcaggactttccaggctgtctgccgaagacggactgaagtttttagattacatcatattaaacggacaaagctgcggaattccttgtgttcccgaagacagtaaggctgattttggtgatcttctgaaggtgaagaaaactgaagctcccatgaaaaaaagcagtgccggtgaccaaaaggtgaaggatatgattcgtcaatgggtgcgcaccgttttcagcgaagaactgaaaatgacggatgagcagataaaagatgatatgccgtttgatgaatacgggattgactcaatactctttgcggaattggttcaatcattgcaaaaacggatcagcatcaagttaacaccgtccttaatgcttcaatatcaaacgattacagaaatggttgactatttcgcagcgcatcatgaagccgattttgtgacaaaagaaaatggtttcgttcaagacggggacgttcagcctgatgtaaccgccgccgctgaagagagaacatccatgaagccgaaagcggataccgaagacgatattgccgtcgtcggcatctcctgccgttttccgggggcgggcggaacggatgctttttgggagctgctgatgaaagggaatactgccatccggcctgtccccgcatcgcgctggcatgcaacagcaaatgcaaaggattatgcggggtggattgatgatatcgacatgtttgatgcgggctttttcggcatctctgaaaaagacgcggcaattatggacccgcaggcgcggatcatattagaagaagcggttcattccgtttatgatgccgggtacggccaaaaggatttgtcgggccggaaagtcggcgtgtacatcggcggcagggcgcagccttcagccggtatggaacatatcctgcaggcgcctaacccgattttgggggcggggcaaaactatttggcggccaacatttcacgatttttgaatgtcacagggccgagccttgtcgtggatacagcatgttcctcagggctgatcgggctgtcctttgcaaaagacgcccttttggccggaaggattgacgcggccttagtcggttcggtgagtctgctcttatctccgtccgcgcaccggttattcggagcgcgccatattttaaatgagaacggcgtgtttcatatattcgaccgtgaatcagcgggagaagtgctcggagaaggagcgggggcggtttttatcaagcgattgagcgatgcggtgcgggacggagaccgcatttacggcgtcataaaagccgtctcggtaaacaatgacggccggacgctcggtcccggttcaccgaatataagagcgcagagagatgtcattcaaactgcgcttaatatggcggaaaagtcgcctgaagacatcggatatatagaagtgaacggaggcggttccccaatcgttgattcggtggaaatcaaggcgctctcagatgtctatcagctgaaccggaaaacgcttctgccctgccggatcggatcggtgaaaccgaatgtagggcatttgcttctgtcttcaggtcttgcgggcttcatccgatgtgtgctgagcgtctatcataagcggattccgcctttcttatcagcgcgtgacccatttgaacattatgactttgaagcgtcgcgtattcattttaatcgtgaacccgttgattggcattcagagaagaaaccccgcgtcgcagctcagagttcatttcctgacggcgggacaaatgctcatatcctcgttgaagaatacagaggtgaaagacagcgggaacatcaccggtcgcctcagccgccggaattcagaaaaaaacactacccgctcttgggcggctggaacagcacggaaagtgaaccggaaaaaacaagtaatgaaaaaacggacattgcggatcttttaaagaaatatgagaaaaaagcagagacaagcactgcacctgcagactcgttttggcaggtgacaacgtgacgtttttaaaaggggactaaccatgaaaaaaacagtgaatctgcgcctgacggcagagcatcccattatgaaaaaccatcttgttcacggagaatctgtcatgcccggtctggcctatattgatatgctgtatcagctggcaaagcaaagccttgatctttcattccgttccatctgtctgaaacgggtgaccatttatcatcctttatcagtgaagcggtcagagcggcttgatgtgagtgtcatattcagtaaagaaaaggagttctggactgcctcgatttgcgaggcggattccgggacggttttcttatcagcggagatgcatgaagaagtcttctcatcagacaggcgtcttgacgcaggggagaaaaaacaacaagccgcacttccatcagtctccttgcatgcggtttacgaagccgcgagaagccgcggactgtcgcatgacgggctgatgaagccggagggagagatctatgcttatgaagaggcatgtttccttgatattcggcagtctgattcatgccgggaaaatctccccggcgctctctttcatcccgcgctgatggacggtgccgccatggcctccggcgtattgcagacagctgcaggcgccgagttatttttaccgatttattatgagtcgtttattgccgctgagactgttacggagcgctgttacgcggtgatttcgaaaaagtccggcacgccttctgaaatggtgaaaatggatattgacttttacaacctcagcggtgcgcatattgcttcactgctcggcctgacagccaaaaaggtgcggtttgaccggcagctgataccaggcgttcagcagatggaggaaaccttataccgcattttctcgacatacgtaggccgttcagtcacaagaaatgatgcgcacaccgtgttttttgaattaggtcttgaatcgtcacagcttctggctattattaaagacatcgaaggggcgtttgatctgcgtctgaatccgactcttttatttgagtgcagcagcatatccgaactgctcgaagacataaaaacaaaaggaacagatgaatcttccagccttgtcgcagatgcagcaccggtctctgaaacacaatcaggcagtcagacatttactttctatgaacatgaagcattccttcaggatcatctggttttcggcaaaccggcactgatgggtgtagtgtatccgtgtctggtgcttgaagcatccggagcgtctcattccggcacgtgtcccgccgagctgaaagatatccgctttacgggcgggcccgtcacgctggagcctggagaggccgcgcagattgacatttcatttgcggcagaaaagagtgccgaacgctttacagcaagctgcactgtctccggtaaagaaagccggaagacatgtgcggaaggagaaataagcagatatacagaggcacccataaaaaaatcatatgacgttgagcaaatgaagtcgcatgcacaaaaggtggcgccggatgtcatttcccgtctgtacgattcggttgccgacttcacgataggcccgatgctgaaaacggtaacagcgggatacaaaatgagtgagagctcctttttattgcagctggacttatcaggaaaaaaagaaaaaggcgatctgcatcactttgcatttgacccgcttatattgaattcatgttatatgtcgctcggtgaagaagaattgcagctgaaaaagcggattcacgtcccgctcatgattgagaggctgacgctttacggacctgtcatgtctgataccgtctatgtggtgaatacaatcaaacataaaaaagacgggtttctctcatttgatgccgcaatcctcagtcataccggggaacagctggcggaattgaaaaatgcgtctgtgaaagaagtgcttcagccaaatcggcttgaaaatgcgtcttttgccccgtccgggaatcaaagccgtcaggaaacgaaaggaaaaccgctggatattgccattgtcgggatttccggcaagtatccgcaggccgatgatatcgatgcgttttgggataatctcaaacaaggcaaggattgtattaccgaaattccgaaagatcgctggaaatgggaacattacttttccgaggaccgtacggcgccgggagcgatctacagcaaatggggcgggttcattgacgggatcgccgattttgatcctgagttttttaagatttccccccgggaagcggaacaccttgatccccaggagcggctgtttttaatgcatgcttggatggccatggaggatgcgggatatacgaggacatcacctgaactggggcgtcaggtaggcgtgtatgccggtgtcatgtatcaggaatacccgctattcgcggctgaagcgggagtgaaaggacggcatatcgggctccccggcgggatttcatccattgctaaccgtgtctcctatttttgtgactttcaagggccgagcatttcggtcgatacgatgtgttcgggttcgctgacttcattgtacatggcgtgccgggatctgcgggatcatcggattcgcgcggcgcttgccggcggagtgaatctcaccgttcatcctaacaagtacttcatgctgagccaggggcagttcatctcatctaaaggacactgcgggagtttcggcgccggaggtgacggctatattccggcagaaggggtcggggtgctgcttcttaaacgtttagaagacgccgtacaagacggagatcggatttacggcgtcattaaaggagctgccattaatcacggcgggagagcgagcggttacaccgtcccgaaccccaaggcgcaaagcgaagtcatttctcaagctttacaggaagcgggggtatctccgggccggatcagctatgtggaagcgcacgggacagggacgaaattaggcgatccgattgaaatccgggctttaaccgatgcattcggtgatgttcctgaaacatgtcttgtcgggtctgtcaaatcaaatatcggacatggggaatcggcagcaggcatcgccgcagttacaaaagtgctgctgcagatgaagcacaaacaaatcgccccatccttgcatgctgatgttttaaatccgaatattcaatttgatgaagggccgttttccgtctgccgtgaattaacagattggaaacggatttcagcagacggagaagaacagccgctcagggcgggaatcagcagctttggtgcgggcggttctaacgcgcatatcattattgaagaatatgaggctcctgtcaaacaagcaatcagcagccaagagccggcggtcattctgctgtctgcgaaaaatggcgagcgtctgacagaatatgcggagcgccttcttgcttttcttcaaaagaagcatattgataagccggacttatttgatgtcgcgtacactttacaagcggggcgcgaagcgatggatgagcggctggctctcattgcggactcccttaaggagctggaggacaagctcagatcgtacttggaaaatgaaaacgcaccgcatctttacaggggacgggcgaagcgaaatcatgagacagtggctgtgtttgaatctgatgaagatttgcaggaagcgatggttaaatggctgaaaaagagaaagtacggtcatttgctgaaaatgtgggtgcagggagtcgatgtggactggaacttgttatattcggaacaaaaaccccggagaatcagtcttcccgtctatccgtttgcaaaagtcagatgctggattcaagatgaagccgaggcggtttcaaaaagggatgacggcaaaacggtgatccatccgctgctccatgaaaacacatccgatctttgggagctgaaattcacctctgtttttaccggacgggaattctttttcactgatcacacagttaatggacagaaggtgctcccgggagccgccgtgatcgaaatggccagagcggccgttgagcgtgccgcatacgctgtgccggacggacgtaaaggaatgtatttgaaagatctcatatggatgaggcctgtcattcataaagggacggatgtagaagtccatatcagccttattcttaaggaaaatgaagacattgaatttacgatttacagcctatcggaagaacctgggggagaacggattttatacagtaaaggcactgcggtatcgggagagatagcagcggttccgtctgttcatttagagggctggctgtccggctgcagtcaatcggttatgacgtctgatgaggtttatcaggctttccggcatgcgggtatgatctacgggccgagccatcaaggcattgatcagctgatgatcggagagaggggggctgcagcccggctgtcgctgccggaaacggcagacagtaccgccgatcagtttgtcatccatccgagtcttctggatgccgcgtttcaggcgtcactgggggccggttcagatactgccggagacactccgatgctgccgttttccctgcggcaggcagaaatatttcagccgactcagaaaacgatgtgggcgcttgtccgcaaacagagcgatcggtcagataacggagcgctgacgctggatattgatttatgtgatgaaaacggcgctgtttgtatgagattgacgggcttctcctgccgggctgtccggcagacaaaccaaaccgaaagcaaacggcaggaagttcagacggcgatgcttgcccctgtttgggacaaaactttcttttccctggaagaaaatcgagcggttgatcaggaacaattgctgatcatcggaaagccgggaaataccataaaggccgcggcaaaaatgtggccccgcgcccatctggcggagacgccggatcattcaagcgagcaaacattacgtgaattgacagccggttatcaagatatccgccatttcttatggattgcgccggatcgtttcgcacccgcatccgccagtcaggaaatgcttgatgagcaggagaatggggtgattcaatgtttccgtttcatcaaagcgctgctgtcactcgggtatggaaaccgaaacatcagctttacggcggtcacccggcagacacagtccgtgtatccgggtgatctcccgcagcctgagcatgcaggcgtacacggtttgatcggttcattggcaaaagaatatccgaactgggacatcaggctgattgatgcagaagaaggcagtgattcgtctgagatgaaaaacatctggcgccttcctccagatccggacggaaatgctgccgcgtaccgtaacggagcttggcacaagcaaaaaacagtccgggtgctgacaagttccgctccgcgtatgtcgtacagagaaggcggcgtttatgctgtcatcggcggagcgggcggcatcggagaagcatggagcaaatacatgatcacccgttacaaagcacggatgatatggatcggcaggcggccgaaggatcaggagattcagagcaaaatagacaggctggccctatcaggccccgcgccgcattatatacaggctgatgctcaagatgccgcagcgcttaaagcggccgtccgttccataagagagcgatacggcaatataacgggagtcatccattccgcgataacgcttgccgacaaaagtatggcgaatatggatgaagcttctttcagaaacgctttttcagctaaggtgaatacgagcgtccgaatgatcgaagcttttaagggagaaccgcttgattttgtgctgtttttctcatccgttaattctttcacaaaaaatgccgggcaaagcaactatgcggcagggtgtacatttcaagacgcctttgcccgccatatcgcttccttgcttgattgtgaagtgaaagtcatgaattggggatattggggcagtctgggcgttgtatcagacccgtcttacagaaaacggatggaggcgtcagggatcggttctattgaacccgatgaagcaatggaggcgctggaagtcttactatcagaaccgttcagccaagcggcattcatcaaagctgctccgcacggcttagccgcactgacggatcaagatgcaatatcggttgtatccggcccggagccttcatttatggaaagcgtcaagcggcaaaatccggatcggaatgaacggcttgagactttaaaacgagaaatggagttgcgcatatgaacagccttctttgcaaactgctcttttatcaattacagtcaatcgggtttttcagcgagcctgtcaccacacctgcagcatccatgcggagcgccggcgtgatcggcacatacggcagatggctggaagaaagcctgaatctattaaaagaaaacggatatatcgcgtatgacggatacacgatcactcttctcgcggatcagcgcccggacggccgcacagtctggaatgagtggaatgcccataaacgcctgcttcccaagggggagcttgcgcaagctgaattggccgaggcgacgataaaagcgatgccttcaattttaaaaggagaacgtccggctacggatatcgtatttcccgattcatcaatgcggctcgttgaaggtgtttataagcataatcccgttgcggattattttaatgaagtgttagcagattccgcggccgcttacctgaaagcctaccttacagaacatcccgatgcccgtatcaggctgatagaagtaggggccgggacgggcggaacgagcgccatgctgtttacaaaactgaaaccatttgcaaaacagattgcggaatattgttatacggatgtttctaaagcttttttaatgcatgccgaacaggaatacggacctgatgtgccgtatttgacaacagccttgtttaatgcggaggagccttgcgaatcacaaaatatcaaaacgggtgtttacgatattgtcatcgccgccaatgtgcttcacgccacaaaaaatatcggtttgacactgcgccgtctgaaagcgctcctgaaatacaacgggatgattttgataaacgaaatcagcgatcgttctgtttttacccatttaaccttcgggctgcttgacggctggtggtcctatgaggatgctgagcttcggattccgggaagtcccggcctatatccaaaatcgtgggagcgtgtgctgcattcggaaggatacagagcggtttgtttccctgctgaaacggctcatgatttaggtcagcagattatcgcagctgagagtgacggactcgtccggatgcaagggatcagagacggcagaaagccatacgccgccccggccgaagttttccgaaagcccgcacagcctgtttcccgcagccgcgcgccagaggagcatcaagctgttaaggctgatggggaatcggtcgcttcccatgtccgctctgtcatcaaaacaagtattgccgatgtattaaaaatgaaagaagaggatattcaggaagaactgaatttctctgaatacggtattgattccattttggccgtcaatgtgattaacgagattaataagcgattgaatcttacactgcagacaacgattttatttgattactatcatgtgaaactgctgaccggttatatctcggcagaatatgaaaccatcatagcctcatctctggagaccgaaagagcgaaaatccgcccggtgcttcaggaagaacggcctgctgaaaaacctttgaagacggatagaaaggaaaacggttatcagaaaccgaaacaagaacggatgccgctttctttcgcaaagtccgatgactcgggaatgttccgggttgtgattgaccgtccgggcggcattgaagatctgacgattgcccgcagtgaagtgcccgagacaaaagatgacgaagttcaaatagccgtccgcgccttttctttgaacttcggagacttgctttgtgtcagagggctgtatccgacgatgccgccttatccgttcactccgggattcgaagcaagcggcgtcgtgatcaagacagggaggcatgtaacatccgtcattccgggtgatgaagtgattgtcggtatgggagaggaatttggctctcaggcgaatctcatcacatgtaaagaacatcaagtctatcataaaccggcccggctgacctttgaagaagcatgcgctcttcctaccgtggcagtgacaatgatagacgccttccggaaagccggacttaaaaaaggcgaaaaaatattaattcagaccgcgacgggaggaacggggctgatcgcggtgcaaatggcccggcatatcggcgcggaaatatatgcaacggccggatcacagaaaaaaattgagtatctgcattcgctcgggatcaacaataccatttgctatttggaagaagattttgaaacggaaatcatgcgaatgaccggcggccgtggggtggatgttgtcattaataccctggccggtgatgccatgcaaaaaggaatgaattgcctggcgccgggcggaagatatatcgaaattgccatgactgcgctgaaatccgctaaatcagtcgacttgtccgtccttcataacaatcaatcgtttcacagcgtggatttgcggaagctgtctcttcaaaatccggatcaggtcaaggactatcaattggaactgcagcggctggcggaagagggagtcattcagcctgtcatctcaaaaatcttttcctttgaagacataaaagaagcgtatcactgtctggatgaccgcggaaatatcgggaaaatcgtcatcagcgtttctgagccgtatcaaatgacgtaccgccccgaacaaaaggatccggccgaaacggtaaaatcagcagctgtgttacctgaaaaagaaccgatcgcgattatcgggatgagcgggcggtttgctgaatcggagaatgtccatgagttttgggaaaacttagccgccggacgggatctgattaaaaaagcagacagatgggctgtctctgacagtcaatgccagtatggcagttttatagagggcattgaatgttttgatcccgttttctttcatatatcgggacgtgaagcaacctatatggacccgcagcagaggctgtttctggaagaatcatggaaagcgcttgaagatgcgggatatgcgggagactcggtaagaggccgggaatgcggcgtgtatgccggctcctgcggcggagattaccaggccatttttaaacagcaggggcccgcgcaggctttttggggcaatcacaattccgtcactccggcaaggatcgcctatcaccttaatttacaagggccggcgatcactgttgatacagcatgttccagttcgctgacagccattcatttggcatgtcaggggctctggacgaaagaaaccgaaatggcggtggcgggcggggttttcattcaatccactcccgctttttatcagtcgtcaaataaggcgaatatgctgtcaccgaccgggcgctgccatacgtttgatcaaagcgcggacggcttcgtgccgggtgaaggcgtgggagcggtggtgctgaaacgtcttagcgacgccgtcagtgacggagatcatgtgtacggcgtcataaaaggctctgcaatgaatcaggacggcgctacaaacggaataaccgctccaagcgcgctttctcaagaacgattggaacggcatgtctatgatacttttcacattaatccggaaaccattcaaatggtggaagctcacggaacgggcactgcactgggcgacccgatcgaattcagcgccttaacgcgcgctttccgccgctatacggataaaaaaggatattgcgccatcggctctgtgaaaaccaatctcggacatgccgctgcggccgcggggatggccggattgtttaaaatcctgctgtcgctgaagcatcggcagattccggcttccctgcattttcatcaagccaatcagcatattcaatttgcggacagcccgttttttgtgaatgaaaagctgataccgtgggaacggaatccggatgcaccgcgcagagccgcgatcagttcattcggattcagcggaacaaatgcccatcttgttattgaagaggcgccgcaaaccgtgcgccggtcaccggcaaaaccggcctgcctcattcctttatctgcgcggacggagcgtcagctggaaattcaggcagaacgcctgctggattcactcagcaagaacaaagacagcgatctgggaaatataagttatacgctcctgctcggcagaaagcatctgcatcaccggtttgcctgtatcgtaagcagtgcggacgaactgaagcgggtattatcggagtggcttgtaaaaagagagcttccgggtgtgtttgtgtccaatttgaaggaccagaagccggcagacgaagccggaatgaaaacattcggaatggaatgcattgaacagtgctgctcggcggcttcacccgcacagtacagagaaagcctggcacatatcgctgaccttttttgcagaggatatgatcttcctttcacacggctttttgacggagggcaatattataaaacgccgcttcctgcctatccgtttttaaaagaaaggtattgggcggctgatgtaaacagttctttaccaggccaagccatgaaaaagtctgaaacgcaaaccgttcccccgtctccgccacagcctgaacatgaaggtctgatttctctgagtcctttaactgagatcgaaatgacagcgtttgaaccggagacattgcaaaaaccgatcgtcttacagcctttggattgtactgttcctgtccagcagccggaaaacgccgtttccgaagacaatagaacattgcttgaagaattgaggataagcctggcagatattttatttttgtcgccggaagatattgatgctgatgagcctttcatcgacatggggcttgactccattatcggggttgaatggatacaaacagtaaataaaacgtaccacactgagattactgccaataaggtgtatgaacacccgacgcttgaggagcttgcggaatatatagcggggcaaataaagaaacccgagtatgctgaagcggaggaaacagcggtacgtccgcaaatcccggaagcagaaactccccttgccggcatctctgacggcactttgcgcaaagagcttaaagaaagccttgcggacatcctgtttctgaagccggaagatattgatgagcatgaggcattcattgacatggggctggattctattatcggtgtggaatgggttcagtctattaataaaacgtatcaagcgtctattacggcaaatctggtctatgaatatccgacaatcgcaaaattagccgggtatctgaccggttccgttcaaaaagacactgatgaagtacatgaggaacatacgaaacaaaacgatatatcagaagagacagatgatcaagaaccgcccgaactgatctgtcttaacccggggggaaagggaagaccgattttctggtttcattccgcgctgggggcagtggagctgtaccagcctgttgccgaacggaccgggcgtcctttttacggaattcaggcaagaggatggatgacagaccgggaaccgatccgcggcattaaaaacatggcggaatattacgttaagctcatacgtaccgtgcagccccggggtccttacgatgtaggcggctattcattagggggcatgctcgcttatgaagtcacccggcaattgcagctggctggagaaaccgttgagtcaatcgtcatgctcgactcctttgactcggcgggtgcgcgggaaataaacattcctgatgaattatttgataaaaatatgatgctgcagacggtgaacatggctttatttgcaccgatctatcaacatccggaacgcatttctgaaaccttgattcaccgtgatgaactagatgccgatcttcatgaagacatatttttagagcaattaatagcaaaagccaaacagcgggggttaacgaagacggacgcgttggtgaaaaatctgatcaggcagaatataaacgttcaggacgcttacgaaatcactgattacgaactcctgccgcttccggatccgaacggggtgacatgctattatttccgaaataaaaacggtattttcttgggtgagcttgatccgtattttacgatcagggccgatattttatccgctgatttcgtcaactactggagccagtggcaagagcatatgacaaacatcgccatcatggatgtggcggtatccaaccatatgacgttattggctgaagacagcgcagccgaaacgatttctgaattttgcggcgttttatattcggcagacggaatgacagaacacagctttctgaaactgcaggaaaagatactgaacgtgcatggtgagatgctgaagcagcccgccaaaataagaccgtaaattcacatatccgcccgccgggtttactcgtaagctttggcgggtcatttcaaatcttggacacatcttggaggaatgaaaatgaccagtttaacaaaaatcagacagcagcagccgtacaagtggtaccaaacgatgagagaaacctctcccgttcattacaatgaaaaggaagattgctgggaaatcttcacctatgatgaagtgaagcgggtgatttctgactacagtcatttttcttccgatcataaatacttaagtgcggacaagcaggaaaaaatgatccggcatattaacaaagacagccttttgaaaatggacccgcctgaacacaccgtcttcagaaaattggtcaatcagccgttcatgccgaaatcggttgagtctcttgcaccgcgtatagccgctatcgctgatgacctgcttcaggccgtccgttcaaaaggcaggatggacattattgaagattacgcatttccgcttccgattatcgtgatcgcagagcttttaggatttcctccgaaagacagggatatctttaaaagctgggtcgaccaaagccagaatgtaaaagatgaaaagaaaatgaatgaagtgcaaaagcagatgatcggatactttatgcagtttattttacagcggagaaaacagccgcaaaatgatttaatcagccatttaatttcagctgatttagacggagagccgctgtcagacaagcaattaatcggtttttgcggcttgttgatcgtcgcggggcacgtaacgacggaaaatgtgatcggaaattcatttctcagtctcaaggagttcccgcatattctgccccggctgcttgaaaataaggcgctccttcctgactttattgaggaagtcatccgcctcagaccttccattcagcgggtaacccgctacaccgcggttgagagcgagattggcggaaaaacgattccggccggagaaaaagtatatgcgtggattggatcggcgaacagagatgaaaagaagtttgaaaatgccgatcagattgacttgggacgaaagccgaatcagcacctgtcattcggtcagggcagccattattgcttaggagcgccgctggcccggcttgaagcgaaaatcgcgctttcccacttttttgaacagatgcccgcatggcgttttactgaggatcaagagccgaatctggttccgagccctgtatttcacggcgttgacaggctgcttgttgagttttgaacgaaaaaataaaagaggcttcgcgggaagcctctttactctgggggcttggagaaatgaatgtaggaatcgaagcaatgaacgtgtttggcggaaccgcgtatgtagacgtcatggagcttgcggaacatcggaacctggataaaaaaaggtttgagaacctgctgatgaaagaaaaagtggtggcgcttccgtttgaagatccgattacgttcgccgtaaatgccgcaaaaccgattatcgattctctgtcagaagaggaacggaatcagattgaaatggtcattacctgtacggaatccgggattgattttggcaaatccatcagtacatatgtccatgattatttgcagctgaagcggaattgccggttatttgaggtgaagcaggcttgctattctttaacggccgggtttcaaatgggcgtgaatttcatcttgtcgcaaacatcgccgggagcgaaagcgctcatcatcggaacggatatttcccgctttttagtggctgaaggcggtgacgcgttgacggaggaatggtcctatgccgaaccgagtgcgggggcgggagctgtcgcgcttttagtcagcagcactcctcatgtctttttgcttgatcaaggtgcaagcgggtattacgggtatgaagtcatggatacctgccgcccgattccggatagtgaagcgggggatgctgatctgtcgctcatgtcttatttggattgctgtgaaaattcatttcaggaataccgaaagcgtgtgagcggggcggattataagaatacatttcaatacctttcttttcatactccgtttggcggaatggtaaaaggagcgcatcggacgatgatgagaaaattggcaaaggctaagccgcaggacattgaagcggattttcagcaacgcgtgctgcctgggattcaatactgtcagcgcgtcggcaacatcatgggggccaccgtatttttatctcttgccagcacgattgataacggctcttttgaaacgccgaaacgcgtcggctgtttttcatacggttcgggctgctgctctgaattttacagcggtgtcgttatgccgcaaagccgtgcgcggcagaatcaatttcagatcagccggcatttggatggacgcgtccgtttatcgatgactgattatgaccggctgctccaagacagcggcatcgtaaaattcggcacaagaaatgccgcgcccgcagcagacatcccgaatgcgcatcaaggaaaaacgcgattagtgctgactgaaataaaagagtttcacagaaagtatgaatggacgacctagtataagagccggaaaggcttgagtatttttaaagaaacggagaatacacatgaatccaatgattgatgtacaggaaacagaaccgggcattgtgcaggtcacaatgcaggatacggccgggaaaaacgggctgtcagaagagtttgtaagagagctgcaccgggtattccaagacatcaatgcccatccgtcctataaaactgtccttctgacgggttacggaaattatttctgcacgggaggaacgcaggaggggcttttgaccattcagagcggaaagcttcaatttacagatttaaagcttcacagtcttttattggattgcaggatccctgtgatttccgtcatgcaggggcatgccatcggagctggctttacgatcggtctgagctcggatttcgtcattttaagcagagagagtttttattcttgtaattatatgaagtacggatttacaccgggaatgggcgcgacgtatattgtgcctgaaaaactgggaattgtcctcggggaagaaatgctgtttacggccgcgaatttcagcggcgccgctctggaaaaacggggtgttccgtttgaagtgctgccgaaaaaagacgcccttcaaagaggccgcgaattggcccggctgctggcggataaaccgagagcctcactggttgcgctgaaaaccaatgtgaccgcacggatcaaaagagagctgacaaaagcggttgaggaagaggtaaacatgcacgaagccacattccatcttcctgaagtaaaagagagaatcagccgcttatacggcagttaaacagaatgaaaaaagcatgggatgcccccatgctttatgactggtccgtcttttgcagaacggagcctgcgaattgttctttaatttcggcgctccgggctgcggtttctgcgatgcagtgcatgatggcttcttcaaagcggcgctcgtctaatgcgcgaaggcctgcttcagtcgtgccgcccgggcttgtgatttccttacgcaggcgttcaggccgtttgctgcttgttctgagcatttccgtcgccccggccatggtttgtaaaatcagctcttttgccgtttcttccggcaggccggcttgaagggcggccttttccatcgcttccacataccggtacacataggcgggaccgcttccggcaatggctgtgacggcatcaaggtgtttttcttcaaagagcgtcgcttctccgattgtttccagaagctcttttgccgtccggatttcagcttcactcgcctcggagcttgcggaaaaaccggtcgccgattgctgaatggccgcggatgtattcggcatcgcccggatgatggtgagctttctgccgaaatattgctgaatcgtgtgaatcgtcagccccgcgatgacagaaatcacaagctgatctttcacgtattcgcgaatgttctcaatgctttctgccgcatctttcggtttaaaggcgagaacaataatgtcggtattgctgaaaaactcttctttatcccggcacggtttcactccgtacgttttttggagctcttcaagccggctgtcatttgaccggtttgtcatatatatatgtccgggggctgtcattccgctttgcagcagtccgttcaccattgcttccgccattgatccggccccgataaaaccgattttcttcatataaatcctccttcttctaaaacacaaaaaaaccttcccgtcaaaaaggacgaaaaggtttcgcggtaccaccttacattagcacgaatcagccgtgctcagctcaaatcccgtaacgagggatacgtttaggttttcctaaccgctctgagggcaggttctgtaaacaagagggccgcaatgtctttcagccggggacattgctctctgctgccgttgtttatatactagttcctcgtcatcgcgttccgtgttttctagtttgttgttcattatgctatgcgaaagagcgggatgtcaatctttttttccgatatgcgcaataatgacacagtgaaaagaaaacgctaaaatatgattattcaggaatgaaaagaacgaaggagcgtaaacatggcagcgagaaagatcattccgatacgtgtgccgactccgtttgcagtcggcgacgttatcgtttatttaataaaagatgaagccttaacccttattgactgcggcccgaatacaaaggaagcggctgaatcgctctcatttcagcttaaggaacacggcgtttctgcggcggatatagaacaggtggtgctcactcatcatcacgcagatcattcaggtctgctgcaccttttttccgaggatacggaagtgatcgggcatccgctgaatgacaggtacattactcaggatcagtcgtatatcgcccggcaggaggacttttttctgtcgcttatgactgaaatgggcgttcccctgacgcctgaagacatacagaaaacagttaagctgtcgtacttattttctgcaaaccgtctgttaacgaaaacagtggaagaaggcgggaaaatcgacgggcttaacggctggacggtgctcgaaatcccgggtcatgccgcttctcacattgcgctctaccatgaaaaaagcggtgaaatgttcagcggcgatctgcttttgtccaacagctccaccaatccgattctggaagctccggaaaaggggggcgtgcgcgcggccccgatgctcgactacttgaactcaatgaagcggctgtatgacgtaaacccgtcccttttatatccgggacacggcgatctgctgacggacgtaaagcctgcttttgacaggcggcttgaaaaacagagaaaccggtcggaatatgtgctgcgcctgttgtcagaggaaacgctgacggctttccaggtatgccggcggctgtttccggctgtgtatgaaaatgaattgtttttaatgatgtcagaaacgatcggccatcttgacgtactggctgcaaaaggggaggctgaatcctttcagtcgggaaatactctgatgtttaaagctgtgaaggggtgaaggaaatgggcagattaacggataagcggatttggatcaccggagcatccggcggactcggagaacggcttgcatattcctgcgcggcagaaggggctcatgtttttttatccgccaggcgggaggaccgcttgcaggaagtgaaaaaaacgattaccgcgcgcggcggacagtgtgatgtcattccgtttgacgtccggcatgcagaagaggctgaaaacgtaaggcgtttgatcggtcatgttgacgtattaatcaacaacgccggcttcggtatttttgaaacagccgctgattcatctttggaggatatgaaggcaatgtttgaagtgaacgtcttcggattaatcgcctgtacgaaggcctgtcttccggtgatgcttcatgcgaaaagcggccatattatcaatatcgcctcacaggccggcaaattggcgacgccgaaatcaagcctttattccgctacgaaacacgccgttttagggtattccaatgcgctgcggcttgagctggccggtacgggtgtagccgtgacaacggttaatcccggtccgatcaaaacagacttctttacaattgcagataaagagggcggttatgtgaaaagcgtcggcagatggatgcttgatgccgaccatgtggcagagcgtattacatccgtaattctgacggataaacgggaaatgaatcttccgcgatggatgagcctcgggacgaagctgtatcagcttttcccttcgtttacagaaaaactggccggccgcgcattaaagaaaaagtaacaagggggagaaaggaatgtccgacctggatatacacaaggcattgatgacagagcctttagtcaggcaaatggcagaggcgcgtgaagtattttggatcaacccgcataaaaccgatgatccagtaaagaatggcgctgaatggagaaaggagattgccgaagcggaagaaaggctgcgccggtttgcgccttatatcgcgtcggcttttccggagacggaagcggcgggaggcctcattgagtctccgcttgtcttcatcaatgaaatgaaaaagcgtctggaacaaagcgccgctcaggctttccccgggcgtctgcttttgaaatgcgacaatgaacttccgatttccggttctattaaagcgcgcggcgggatttatgaagtgctgaagcatgctgaagatctcgctttaaaagcgggaatgctctcaacagacgatgattacagcatattgactgaggaacggtttaccgcttttttctcaaaatactctatagccgtcggttctacgggcaatttaggtctgagtatcggcataatcggcgcgaagctcggcttttgtgtgaccgttcatatgtccagtgacgcaaagcagtggaaaaaggagctgctccgggaaaagggggttcgcgtcatcgaatatgaagcagactacagtctggctgtcaaagaggggcgcatgcaggcgaagcaggacccttattgttattttattgatgatgagcattcccgggatctgtttctggggtatgccgttgcgggaagccgtgtgaaaaagcagctcgatcaaatgaacataaagccgggtgcagatgaaccgcttttcgtttatttgccgtgcggggtcggaggaggcccgggcggcgtcgcgcttgcgctaaagctgatctatggcgggcatgtccatatttttttcggtgagccgacgcattcaccctgtatgctgttaggactgttttccggcttgcatgacggaatcagcgtgcaggatatcggccttgataatcaaacagccgccgacggacttgcggtaggaaggccgtccggactggccggccctctgatggagcctgtactcagcggctgttataccgctgatgacggcacgcttttttcactgctttatcaattaagagcggccgagaataagagccttgaaccctctgcactcgccggtatggccggagccgtcaagttcgttcagaccgaagccggtaaccgttatataaaagagcgggggcttgagatggaaaatgccgtgcaccttgtgtggggtaccggcggaagcatggttcccaaggaggaaatggaagagtacagccggatcggttcctcatttgtgaaaaaaatgggcagacagtgaggcggttttccgttacaatctttgtaagcgtttgttttttaatcggaaagccatacagagagattggtgtgaattgtgaaaagtaaagaattgaacttacatacattgtatacgcagcacagccgcgagtcgtgggccggattcggcggccatctttccattgccgtttcggaggaagaagccaaggccgtagaggggctgaatgactacctgtcggtggaagaagtagaaacgatttatattccgcttgtgcgactgctccatcttcatgtcacgtctgccgcaagacggaatcagcatgtcaacgtgtttctgaaacatccgcattcagcgaaaatcccgtttatcatcggaatcgcgggcagcgtcgccgtcggcaaaagcacgacggcgagaattttgcaaaagcttctttcccgtctgccggacaggccgaaggtgagcctggtgacaaccgacggtttcttgtatccgacggcggaattaaaaaagaaaaaccttctgtccagaaagggatttccggaaagttacgacgtgaaagcgctgcttgagtttctgaacgatataaagtcagggaaagagagagtggaggcgcccgtatactcccaccttacctatgacagggaagagggtgccgtcgaggttgtcgaaggtgcggatatcgttattatcgaaggaatcaatgtcctgcagtcgccgaccttagaggacgacagggaagatccgcggatttttgtatcggatttctttgatttttcgatctatgtggatgccgaagaaagccggattttcacgtggtatttggagcgtttccgcctcttaagagaaaccgcttttcaagatccggcttcttattttcataaatttaaggatttgtctgatgcagaagcggataccatggccgcctccatctgggagagcgtcaaccgtccgaatctgtatgaaaatatcctgccgacaaaattcagatcggatttgattttgaggaaaggtgacggccataaagttgaagaggtgctggtaaggcgggtgtgatgtgaggaggaagcgaatattatgatgcatcatattgaattgtatgtatctgacttgaaagcctccgcccggttttggggatggtttttaggtgagctcggttatagggagtttcaaaattgggactccggcatcagctggaaaaacgccggattttatgttgtgcttgtacagacagaggagcgttttttaacaccggagtaccacagatgccgggtcgggctgaaccatctggcttttcatgctgcgtcaagagagcaggttgacgggatgacggaaaagctgcttgccagaggatgccccgtgctttacagggaccgccatccatatgcaggcggaagcacgcattacgccgtatacacggaggacccggatcggataaaggtggagctggctgcgcctgcttctgaatgaactataacttctcgtttttttcttcgcgcagcgcgtcgagtttcttttcgattctgtccaattgtatgcggcgctgcttcaagcttctgaatacgtatatcacggcaaacaggaaaaatgcggctgcaataaatgagatcaattgaaaaatgacatcaccgatgttcatcttttttacctccgtgtgcggcgggcttcttcagcccgccgttttttcattttaaccgatgtgaagacatgggggatgaatcatttctctcctagctttgtttctttctgagaatgaatagtttctgcatatggcttatgatcacttttgcggccgcatatcccggaatggccagcagcatcccggcaattcctgagaatttgccggcggcaagcagaagaaaaataatggtcagcgggtgaatgtccagcttccgtcccataatttgcggggaaatcagctggctttcaagctgctggacaatgacgacgaccgtaatcaccagcaccgcctcggtcggtgaatcgaacaatccgacaatgactccgggaaatgtgccgatccaaggcccgataaacggaatcagatttgtcaccatggcgaacgcgcccagaacgagcggataatcgagcccgatgataaaatagccgattgtgacgagaacgccgacacagaaactgacgagcagctgtccttgtatgtatgaactgagagcttcatccatatcccgcaggatttgttttccttctttttgatgtttttccggaagaagccgcagcagtcgccggggggctttatttccttcttttaacatgtaatacagcgcaaacggaataatggctgcggtgatggcggcattggcagccgtaccggccagactgctgagagaatcagcgattgaaccggaataatttgcggctttgtccgctaattttttaaaggaatccccatgctgaagcctggaaaaccatttgctgtcctgaagatgcccgatccaattttcagcttttgcggaaagctccggaatatggtctgtgaaggctgtaaactgtttttgaacggcagggcccgccgtataaaggaagaggacaaaaaggccggctgttcccgcataaatcgctaaaatcgcgattccttggggcagctttaatttcgcatgcagcactctgacgagcgggcggcacaaatagtaaaggacacccgataatacaatgggcggaaacaaggttttaaccgtaatcacaacaggctggaacaaaaagtctattaatgttccgagataaatgatgagaaataacagaagaacggcatagccgatcttgaaataaggcccgacaggcatatcctgcaccacgcaatctttagggtttactctcggacgtttcccttttcgcccggtgcataaacgtccgtgtcaggaaaactgcccctgattggtgacgtaatcgtagataatatcttctacatgggcatggagatcctcatcgggttcttcattccttctttcttctaaagctttttttaaactctgtttttcataggggctcagcggatctgtcgacacattccgtccatactggcggagggcttgtcccagcattttttctataaattgatccatcatatattctcctattcttgtcattcatctttattctactaaatatcatgtgatcctcccactcttctatcatattttctgtcaggacgatttaggcttttattccagttcagccgagagaataagatgaaacggcagcgttaacgcatcttcatcgtttatgatttttaaacgtttttcgtcatgcctcacttgtttcacccatccccaaaagcggcgggggccgcgtgctgaagcataggtgaccgagatggctctgtcttcttcaatcgacgccgcaatgatgcggttcatgtcgttcagttgctctgcgctcagttccggaggccggaattcccgttcttttcgtttttttgcaagcagctgctcccgatgttcgggcagcatcatccggcttgattcccacatgacattatacccgggtgttaatttgttcggattcatgtatatcacctcaattatttgtaatgcccgccgattttttcagcccggtgaaaggcttggccggcctctgtcagcgaagcggcatggaggagcgacgcagggccgtaccgctcatgaatatcatccaatactttgccgagactgatctttttttcctgagcatcaaacaggctcagctgaacataatcacagggctccagctgggaaagggagacgccggcgctgcggacgggctcaccgttccaatgctctttgaagagcttgaccgccgctttaaaaatatccattccgaaattagtcggagagaccagctttctctgtctgtgaaaacctgaagggaattcaaaatcagcgcctctgatgctgaccgaaaccgtatggccgatgtattgtttgaaacgggcgcggcgggccacttcttcgcttaactccaacagcacgactttgatatcctcaaagcggctgtagtctctcgggagggtcatgttatggccgatcgctttttgccggctgtgcgtgttgacggtgaccggagagggatcgatgccgcgggctgtccgctgaagcaattcgccgttaatgccccagcgttttttcagcagttcggcggggtgcccggcaagcccgccgattgtgctgatgcccatccgtcttaaatgatgctccatccgttttccgatgccgaataattttccgaccggcagcggccacagatcctccctgatatttgacatatccaatctgtggatgccggatgcgttttttttggcaaaatggtcgcaagccattttcgcgagcgccttattcggcccgatgccgacacgggcataaattccgaattcacgcataatcgcttgctgaatgctttcggcaattgtaaaaggatcaccgaacagccgcctgcttccggtcacgtcgagaaactgctcatcgatggagtagggttctacaagatcggtataccgttcaaacagttcggtaatcatgacggatacatcaatatactgctgcatccgcggacggacaataacggcgtcgggacatttggcctgcgcttcccacagccgttcggcattttttacgccgtatcgtttggcgagcggacaagccgcaagcacgacgccgctgcgtctttcgggatctcccgagacaatcacgggccggcttttgagatgaggcgcttccgctttttccacagacgcataaaacgattgcatatcaacaagaagaatatcagccataaaaaaacctccgggaacgtttgttctgtttttcattgtacccgaacaatgatcacgtttatactggtaaatcattccccggctggaagacgtgctgattcgtttgcttgaaaagaaatcatttacaattgcaaacaacccacatataattttttatattccaatgagaagagctgacattcattttgccggacgaaaaggagagtcaatcgataatggatattcgaacaattacctctgaagactatgaaatggttacgtctgttttgaatgaatggtggggcggcaggcagatgaaagacaaactgccgcgcttgttttttgaacattttcaggacacgagctttatcacgtacgggccggagggaatgaccggttttttaatcggttttcagtcacaatcagaccctgagacagcctacattcatttttccggtgtgcatccggatttcagaaaaatgcaaattggaaaacagctctacgatcgatttatggagacggtgaaaaaaaggggctgcacaaaagtcaattgcgtgacggcgcccgtgaataaagtatcaatcgcttatcatacaaaattaggctttgaagttgaaaaaggaaccaaaaccgtaaacggaatccctgtttttgcgaattatgacggtccgggagaagacagaattctgtttgtgaaatatatgtagagggggatgaatatgggttttttagctgacacgcccaaaccgccctattatgcggtcattttttcatcaataaagggaaaatatgatgaggaatatgagcatacggcagagcgcatgatgaatttggcaggcggacagccgggctttttaggcgcggaaagcgttcgggaggaaaacggctgcggcatcacggtttcctactgggacagcctggaggcgattaaaaggtggaaagaccatactgaccaccgggcggcaaaacaaaaaggaaaaagcgcctggtatgaagcgtacgcggtccgcattacgaagacggagtcacagcggatgtttgcgtcaaaaggggcggaagattgattacatttttacggcatacacaagaacagacggcgcgggaaattgcggcggttcaacgctgctcttatcaaaaagaagccgagctgatcggctttttcggcattccagccctgcatgaaacacccggtgacatacagcggtcacgggagacgtttgccggtttcagagaaaaagatcggcttgcaggcgtcatttcgtatgaaaaaaaaggatatgaccttgtcatatgcaggctgacggtgcacccgtccggctttcggaaaggaatcggacgggcgcttattcaatttgtgatcgaccaaaaccgggacgcccaaaaaatagaggcggctaccgccagtcaaaacgttccggcagtctctctctatttaaaaaccggcttcacagaagccggacagacagagacgccggaagggctgaccctctcgttttttcatctttatccgaagaggaaagcggaagttgttccgtacaagccggaatggaaagagatgtttgaaagagagaaggcggacttgatccgaatcttcggccccgcacttcattctgtcagccatatcggcagcacctccatcccgggaatggccgcaaaacccgttatcgatatactggcggaggtcaaagatatttcagatgctgaccgattcagcccgcagctggaagcactcggctatgaggcgcaaggggaaaacgggatagagggccggcgtttctttcaaaaaggcggcagcaagcgcacacaccacgtccacatatacgaaacaggccatccggatgtgaagcgccatctgctgttccgggattacctcactgaaaagcctgaaaaagcggctcaatacatggaactgaaacggcggctcgctaaggcatacccgtacgatacggcaaagtatagtgaagggaaaaatgactggatcaaggcggctgaacaagaggcaaaggactgggagagcgggcttctgtaaagaaagcagaaacaatgcatacagcggctcggtatgctacaatggcgaaaatgaaaaacggaggatcatctatgcaaatacatgtgacggatgcggcgaaacacacacttcagcaggcgatggacgccaacccggggaaaaaagcgcagctccgctatgacgcagaaggctgcgggtgcgcggtgagcggcgtgccgaccatctggctggcggacgaattaacgggacaatgcgaagccattgaaaccaacggacttccgctttacatccagacctcacaaaaagtgttttttgacgaggaaatgacaatcgattacaatgaaaaggcaaaaacgctcgtcttaaaaagcccggcagagatgctgagcccgagaatgagcatattagtaaagcagggagaaacggaaagtgaatcaaaagctgaaagccattaaacagacggcacagcataaaacgtgggtatcctttctgaacaacaaccacccgtacagtctgctgcactggtccatcggaggcgctgaatccgttcagaaggatgtctggctgcttcaggatgagatgaccttcaaagcgcaggagtttacgacaatcgacctcgccattgactggatcggagaaaatatggacgggattaccgacgttttatgacgggaaagcgaaagaaccagcatacgttctttcgcttttttacgtttgcgtcatggtatctaaaaaggtttgaacggctttgcggtagctctccggatttttggtgtacgacatggcatgcccgcccgattcggccagatagagcatcttcggtccgcgttttctgcggtgcagcaattcggaagaagcgggaggtatataatcatcttccttactgtgaataaacagcacgggctgccggtcggctgataaccgatagaggcgatacatcacggatacggtatccttctctcatccgcaaaaagaaatcagccaaaggcagaagcggccacggaggcagccggaactcccgcttcagtctgtaggcgagctgatcgcgaaagcttgcgaacggacagtccgcaatataaaaatcagcgcctttttcatcctgatgcccgcccgcgtataataaggccgtcaccgctcccatcgattccccgtggatgccgatttgaccgccgtctcccgttttgtgtctcacccaattcacggcttcttccaaatcatctttttcaaaatagccgtagctcgtcgttctgccgccgctttttccgtgcccgcggtggtcatatacgagcacattccagcctgaatctaaaaataaatccatgtatttcaatgaattgaacgaatttacggtaacgccgtgacaaataatcatggcgtttgccgtatgatgcggggcgacgtaaaagcctttgatctcatacccgtggcgtgacaggatgacggcctcttctttttccatggcctgaaaggaatcaaatctatcatgcccgtccgccgtttcttttttcatgatatcttcatccgtctttttcttcataaacataatgagattcgtaaaagcgaatccggcagccaaaaagactgcgcaagccgaaccgaacaccgccagccattttttcacacaggggccctcctttcatatgaaaaatccttcctccggcttttcaggaccgtgaacgttgccggcctccggcgctccgtggtacacttgcttcaccatattcagatacggggggcgtaatgatgaaaaagcagctgcctaaagaaaaacacagcttaaaagacgatctggaggaagatctgaaggccaggcttttgcaaatgaaaagtgagctgaaggaagaagacgagaaaaaacaggcgcagcaaaaagcggaacaaatcagaaagcgaaaagaaaaagaaaaacataaaagctttgaagagctgctgaatgaaagcagtctcgattggcacaaatataaataaaccggcatctgacaaggtgccggttttattgtttaagaacgatgggcttcgtatacgtcccgttttgtatggtattgcagggctttgatttcctggctgcttaaacgccgggcctctgcagccgaacagttttctctcagctgctcaagtgagctggctccggtgatgacagaagcgacggccggctgtgacagtaagtattgaagggaaagctccgtcatgctcaagtcaggtgcggcagcgccgatcgcttttttggtttcttccaattctgcaaaagaatatgttaaatacccgttctcttttacgcttgcggctgcttgatcaagcggtttttccgtaagaagccctttagcgacaggccctctggcgactacgctgattccgttctcctctaaaaggggaagccactcctcaggacgccggtccagcaggctgtattgcatcataacgcttgagatatttgattttttcacatattctttaatgacattcggacgaatcgaggaaatgccgtaataccggatgacgccttcctgttttaagtcctcaaacgcttcgatcgtttcgtcaatatgatcttccatcgtgccgccatgcagctgataaaggtcgatatagtccgttttcagccggcgcagactgtttttgaccgcttcttttatgtatcctttggaggcgtcccaatgccagccgtctttatcatcattccagcggtttccggctttcgtggctaaaatgatgtcgtgcctgcggtttttgacggcctccccgacaatttcctcatttctgccgaaatcataaagatcagcggtatctaaataattgattccaagctcgatcgcttcatccaaaatagacagcgcttcagctttatccgtgcccagcgacatacagccgagcccgatttcgcttatttctaaatcagaatgtcccagtgtgcgttttctcatcgtttcgctcctttttatagtcttttattgaccgtaatataaaggcgcgaagttttcaactgttaaggcccggtgatccaatctccgacatagcggaatgtccgtccgtattctttcagtttagcccgcacttcccacgcctttccgaccaatacgatacttttatccttccggtacaccttcaatcgaaaagcacctccctctcatgcatgtatgataaaatatatgaggcataatagagagacagaacgggagatgacatgatgaaacatttagaagaaaaaacacttgcgaaaaaaaagctgtatgacgggaaagtcatagatctttacttagaggatgtagagctcccgaacggaaaaacaagcaagcgggaaatcgtcaaacatccgggagcggtggccgtacttgcggtgaccgaagaaggaaaaatcattttggtaaaccagttcagaaagccgctggaacggacaatcgttgaaattccggccgggaagcttgaaaagggggaagagccggaacatacggcgttaagagagctcgaggaagaaacgggatatacggcggaaaccttgacgaaaatcaccgctttttatacatcacccgggtttgctgatgaaatcgtgcatctctttcttgcggaagggctttcgccgctggaagaaaagcgcgaactggatgaggatgaatttgtcgaagtcatgcaggtcacgcttgaagaggccgtgaagctgattgaatcccgcagggtgtatgacgcaaaaacggcgtacgcgattcagtatctgcagctgaaagaagcactgaaggaaaaatgatgaaaaccatctatgcggatctgcatattcatatcggccgcacctatacgggaaaaccggtcaaaatcaccggggccaaaacgttgacgctgcatcggattttagaagaggccagtgaggggaagggaattgaactattgggcatcatcgactgccattccccggaagtcatagaagaaatcgagcgcggaattgatgaaggcagataccgtgagctgaaagaaggcggcatccggtatcggaatacgacgcttctgttgggcagtgagcttgaaatctatgatcacacatgccgcgggccgattcacgttctcgtctttatgccgtctcttgccgaaatgaagatgttttctgagtggctcgcaaaaaggcttaaaaatatccatctcagttcccagcgtatttatgaaaccggtttgaatcttcaaaggaaaacaaaggaattgggcgggctgtttattcccgcccatatgttcaccccgcataaaagcctgtacggaaaaggggtcatatcttctttgacagaagttttcgacccggcgctcattgatgcggcggaactcggattaagctgcgacaccgacatggcttcgcgggtaacggaacttgatccgtatacatttttaacaaattctgatgcgcattccttaggaaaaatcggcagagaatataatgaaatgcttcttaaagaagcgaatttcacggaattttcgctggctttaaaagggaaggacggaagaaaaatcacggcgaattacgggctgaacccgaagctcgggaagtattaccggacggcttgcgaccgctgcggcagcccggttgaaaaaggagcttccgcctgtccggagtgcggggggaaaactatgacaaaaggggtcagtgaacggctggaggaactgagcggcccgaaaaaaagccgcgtgccgcggccgccgtatattcatcaaatcccgctgcagttcattccgggggtcgggccgaaaacgttagacaaactgaagcgggctttcgggacggagatggcgattcttcatcaggcgcaagaagaggaattggcgcatgtcgtccagcctaaaatagcggctgtcattcataaagcgcgcaccgggcagctcgtccttgaggccgggggcggagggacgtacggcagaatcaagtcgtaaaagccggattttagcggagctcctcctgcaccttctttttcgtgcggacaaacgcaatcaattcgatgatttcatcctgattcagcggctgtccgtcaacggtcagtgtgccgcggccttgtgcggcgtttgttaattcgatggtctgggtaaacggctccgcctttttttcagtgcgccccagtaaatcgtcgcacgtcgtgtcaaacagatcggcaagcgtgcccagcgcttcgaatgacggacgccggtatcctgattcatacccggcgtacgtgcttttggcgatgccgagacggtcagccgtatattgaagagaccaatttttcttttttctcagttcagttaaacgatctaaattcatattcaaaaccgctccttttcacttgagcaaattatatcatatcgatatgcaaaagtgtacgcgaattgaataataatcacttgattaatttcaatcgtctgtctataatttgattaaaagtatgcgaaaagcgaatgcttaacacatcttgagaaatggatgaagaggtgcagggtatgaaaaaattattgctgttaacaaccggaggaacaatcgcctcagtcgaaggagaaaacgggcttgcacccggggtgaaagcagacgaattgttaacctacgtatcaaaacttgataacgattacacgatggaaacccattcgttaatgaacatcgacagcacaaatatgcagcctgaatactgggccgaaatcgcaaatgctgtcaaagaaaaatatgacgcatatgacgggttcgtcattacgcacgggacagacacaatggcgtatacatcagcggcactgtcttatatgcttcagcatgctgataaaccgatcgtcattacgggttcgcaaattccgattacatttcaaaaaaccgatgccaaaaaaaatatcacggacgcgatccgcttcgcatgtgaaggggtgggcggcgtatacgtcgtatttgacggcagagtcattcaaggcacacgcgccattaaattaagaacgaaaagctatgatgcatttgagagcattaactatccgtatatcgcgtttattaccgaaaacggaattgaatacaacaaacaagtgcacatgccaaaagacgatgcctttacggtcaatacctcactttgcacggacgtgtgcctgctcaagctccacccggggctgaaaccggaaatgtttgacgcattaaagggcatgtacaaagggatcgtcattgaaagctacggcagcggcggcgtgccgtttgaaggaagagacattctcgccaaagtcaatgaaatgattgaaagcggcattgtcgtcgtcattacgacacaatgtcttgaagaaggagaggacatgagcgtctatgaagtcggccgaagagtcaatcaagatctcattatccgctccagaaatatgaacacggaagccatcgtgccgaaattaatgtgggcgctcggccagtctcacaacttggctgaagtcaaaaacattatggagacaccgatcgcagacgacgttgtactgtaaaaacatgactaccacaaagagaaagtagggttttagcatgacaaacgcgcaaaaagaatatcgtcaggaaaaagatttcctcggagaaaaacaaattgaagctgatgtgtattacggaatacaaacgctgcgcgcgaaagaaaactttccgattaccggctaccgcatccacgaagagatgattaatgcgctcgccatcgtcaaaaaagcggcggcgcttgccaacatggatgtaaaacggctgtatgaaggaatcggaaatgcgattgtccaggccgcagacgagattcttgaggggaaatggcatgaccaattcatcgtcgatccgatccaagggggagccggaacgtccatgaacatgaatgccaacgaagtaatcggcaacagggcccttgaaatcatgggccataaaaaaggtgaatacattcacctcagcccgaacacacacgtcaacatgtcccaatcgacgaacgacgtgttcccgacggcaatccatatttccaccttaaaacttttggataagctccttgatacgatggcgcatatgctgagtgtctttaaggataaagcgaaacaatttgattctgtcattaaaatggggcgcacacaccttcaggacgctgtgccgatccgtctcggacaggaatttgaagcatacagccgcgtgctcgagcgtgacataaagcgaattaaacaatcccgccagcatctgtatgaagtcaacatgggggcaacggccgtagggacggggcttaatgccgatccgcgctacatagaacaggttgtaaagcacctggctgacatcagcggactgccgcttgtcggcgccggccatttggttgacgccacacaaaacactgatgcgtatacggaagtttcagccgcgttgaaagtatgcatgatgaacatgtctaaaatcgccaacgatctgcgcttaatggcttcaggtccgcgcgcgggacttgcggaaatttcactgcccgcccgtcagccgggatcatccattatgcctgggaaagtcaaccctgtaatggcagagctgatcaaccaaatcgccttccaggtcatcgggaatgacaatacgatctgcctcgcttcagaagcgggccagctggagcttaacgtaatggagccggtactcgtatttaacctgcttcaatccatcagcatcatgaataacgggttccgttcatttaccgatcattgtctggcgggaattgaagccaacgaaaaacgtctgaagcaatacgtggaaaaaagcgtcggcgtcattacagcggtcaatccgcacctcggctatgaagcggctgcgcgaattgcccgtgaagccatcatgacggggcaatctgtaagagatctttgccttcaaaatgatgtactgacagaagaagaattggatatcattttgaatccgtatgaaatgacaaaaccggggattgccggaaaagatctattagaaaaataaattttaaagcaacaacagccgccttttcacgtttttcagtgaataggcggttgccatacaaagggatgaggcagtatagtataatttgttatatcatttgatgaaagcgttttagcttttttcttctagggggattttcttgtgaaagaggtcagattgccaaatttattggaaattattatcttattattcgggtttttagcacttgtcttatcgttcacagtgtttttagacctgccgatccagctagctctattaatatcctggtttttcgctattattctcggagtcaggctgggatattcatataaagacttgcaggattcgattgtcaccgggatatcaaacggtcttgaagcggtgttgattctcgtttcggtcggtgcgctcatcgggacatggattgccggcggtgttgtgccgacgttaatttattatggtttagagtttattaatcctcatattttccttctggctacactggttatttgttccgttatgtccgttgcgaccggaacatcgtggggaaccgtgggaaccgcggggatcgccatgattgccatcggagagggaatgggtataccgcttccgatcgtagcgggagccgttttgtccggcgcttacttcggagacaagctttcaccgctgtctgacagtacggtgcttgcctccacgctttctaaggtggatgtgctgtcgcacgtcagagcgatgatgtatctgtcaattccgtcctatattattacggccattctatttaccgtaacgggatttatatacggcggaaaaaatattgatctcgacaaagtggaatttttaaaatcttcattgcagaaaacgtttgatattcatatatggatgctcattccggctgttgtcgtcgttgtccttctgattttgaaaaagccgtctatgcccgttattatcatcggtgctttgcttggcgcaatctgggcttccgtctttcagggaatgaattttgccagtgccatcgcgactgcttataatggtttttctattaaaacggacgtcgaatttttaaacggcctgttaaaccgcggaggcattaccggtatgctggatacgttagtcgttatcctgttcggtctcggttttggaggaattcttgagaagctcggcgtattaaaagtgattgtctcaacttttgagaaaaagctgaccacaccgggaaatgtgacgctttcgacattgatcgtcgcccttttaggaaacattttcggctgtgcgatgtacgtgtcattgatcctgacgccgaaaatcatggagaacagttatgataaactgaaacttgacagaagagttttatcccggaacgcagaggtgggcggaacgcttacttcagggatggtgccgtggtctgataacggcatctatatggccggcattctcggcgtatccacattttcatatctgccgttcatgtggctcagttttgtatctatcggactggcaatattgtacggatacacggggaaattcatttggtacacgaaagaaaaatccttgcaatctcaaaaattgggttaggaggttcatttcatgattacaaagcatatgattcggacgttaatgattgaaacgccgactgttcccggaaatctcggaaaagtggcaaccgccatcggagtgatgggcggagatatcggggaagttgaaaccgttaaagtcggcccgaactacacaatgcgcaacatcacggtgcaggccgaaaatgaggagcagctgcaggaaatcattcaagccattgaagctctcggtgaaggcatccggcttcatacagtctcagatgaagtgctctctgctcatgaaggcggcaaaattcaaatgaaaagcaaaatgccgatccggacattggctgagcttggccgtgtttatacaccgggcgtcgccgatgtgtgccgactgattgaaaacgagcctgaaaaagcgtccatctatacgacaatcagcaattctgtcgccattgtcaccgacggcacggcgattctcggcctcggcaatatcggttctgtcgccggaatgcctgtaatggaagggaaagccgcgctttttgaccagctggcgggtatcagcggaattccgattttgcttgatacctctgatccggaagaaattattcgcacggtaaaacatatttctccggggttcagcggaatactgcttgaagatatcggttcgcctcactgctttgacattgaagaccgcctgaaagaagaactggatattccggttatgcacgatgatcagcacggcacggcggtcgtcacgctcgccgccgccatttccgcttgtaaaagcgccggtcttgatttaaaagaagcgaaggtcggacagatcggtctcggcgcggcaggcgtcgccatctgccggatgtttatggcatacggagtcaaagcggtctgcggaacggacaagtcagaagacgcaatgaaccgcctcgctcagtacggaggtcagccgcttggaagcatcaaagatttaatggacacgtgtgacattgtgatcagcaccaccggagttccgggtctcattaaaaaagaggatgtcagaaaaggacatgtcattctggccttatctaatccgaagccggagattgaaccggaagacgcattacaagccggagccgcttatgcagccgacggccgctcggtcaataatgttctcggcttcccggggattttccgcggcgcgctgaacgccaaaagcaagaaaatcgaccatgaaatgcttgtggcggccgcagaagccatcgcctcttgcacaaaacacggcgatctcgtgcctcagcctttggatgcggacgtgcatcaggctgtatcagcagccgtagaacgggccgcggcaggaaaataaacaactcttacagtaccggacatgtgccggtgctgtttttttagatgaataggaaacggaattcttaggcaggctaacagatagcaaaagacggaataaagaggtgtcaatgtggattattttccgctgatccatacaaatatttgggatgctgtgatcggcgtgccggtcgtcttatgcgttacacagctgatcaaagtgttctgccgggttccgggcatattcgttcccacgattgcccttgctgccggaaatgttgtgtctatcgttttcggtcaccatgaacacgtgtatgcggggattttcatgggatttttttacggatacgccgctatggggagctattcatctgccaaaacgtctctgcgcgcttaccggtcgaaacatgagccgtattcatgaacacatcgggatttttttgttatgataaagaaaaggcaaaaaggagcgattggcacatggcgaagagcaaaacgaaaaaaatgcgggagcatctcagaagaaacgggatgcgtgacgcagtcttgtcaagggggacggcgccgcctttcagcacccatgaaagagtgacgaaaactaaaaaagacaggcttgaaagaataaagcataaaaaaaggaacccctatgatcaccggagtgatgacgggggttctttttttatgcccgaatctcgcgcctttctatgatttctctgtcatgttttctcttttctttcatacaatctactaaatcaagtcaatagattagcgggaggaaagcggtatgagaaaacaatcgtacaaagaactgttttttcgccatgtaaaggatcatctgtcactttatatatttgtgttcgtcttgtttttgatgggggtcattttcggggcgatcatcgtcaacagcatgaccatcacgcagaaagaagatttgtattactatttaagcaagtttttcggacagctgtctgacggaaaacatgccggcgcttcagaaatgttttggcaggccgtctttcatgatgtaaaatatttggggctgatgtggattctcggtatttccgtgatcggtcttccggttattttcattatggtgttcttaaaaggaatcgtcgtcggcttcacggtcggttttttagtgaatcaaatggggatgaacgggtttttcctgtcatttatttcggttctgccgcaaaacatcgttctcattccagcatatcttatcatggggacatgctccatcgctttttcactgaaactgatccggcagctgtttgtcaaacgcagccttcatgacgcgccgatccaatggttcggacgctacgccttcgtactgattctcatcgttttcttctcggtcctcgcttcactgctcgaagcgtacatgtctccgctgtttatggaaaagctgtcatcacgcatattttagaattattatcacaaaataatacttttatttatcagtttataataattatagttggaactctgcgcgtattttgttataatgagtcatggaatgcggcgtaggagggaaagacatggaaaaccgtattgatcgaattaaaaagcagctgcactcgtcaagctacaagcttacgccacagcgggaagcaacggtaagagtgctgcttgaaaacgaagaagaccatttaagcgcagaagatgtatacctcctcgtaaaagagaaatctcctgaaattggtctcgctacagtataccgtacattagaattattaacagaattaaaagtcgttgataaaattaacttcggggacggcgtatcccgctacgaccttcgcaaagagggcgcggctcattttcatcaccatttggtgtgcatggagtgcggagccgtcgatgaaattgaagaagatctgcttgaagacgttgaagaagtgattgaacgtgattggaaatttaaaattaaagatcatagattgacttttcacggaatctgccaccgctgccgcggggatgaaacagagtaaaagcctatgaaccttttctgccaggaaagggttttttgctgtttttatgtataaaagcctttgaaattggcataaggtgtactaacagccgccaaagaaagggtcgatcgaaagatgggcagattcctgaaaacagccgcggatacgatcaaagtgtttattctgttcacaggttttaccgcgctgttctattatgctatgatatgggtgaattcagagtatgaaaactatcatcggtacgataaaccggaaggctccgccgtcaaagtggccaaaacggaacatgaggagaaagacggctggttcggccgattgatctttttttaccaaaacggggagtagatcaagagtgaaggatcaaattaaggatttcatccattatgtgagggttgaaagagggctgtccctaaatacgatgatgtcctatgagcgtgatctgaaaagttattctctcttcttaactgaaacccttcagatcacttcatggaatgatgtgacccgtcttcatattattcaatatttaaagcatataaaggactccgggaaatccggcaagacgtctgccaggcatttggcgtcgatccggtcttttcatcaatttctgttaagggaaaaagccgcggataaagatccttcggtacatattgaaacacaaaaaacagagcggacgcttccgaaagtattggcgcttcacgaagttgagcggttattggacacgcctaagcttgacagcccgttcggtctcagggataaagccatgcttgaactgctgtacgcaaccggcatccgggtcagcgagatgatcgagctgaaattatccgacgtccatttgacgatgggatttgtccgctgcttcggaaaagggcggaaagagcggattgtgccgattggtgaagccgcttcccatgcgatagaagcatacattgaaaaagccagagggaaattattaaagaaaaacgtaaccgaagcgctttttctgaatcatcacggcaggcagatcagccgtcagggattctggaaaaacctgaaaaaaatcgcccttgaagcggggattaaaaaagagctgacaccgcacacgctccggcactcttttgcaacgcacctgctcgaaaacggcgcggatctgcgcgccgtgcaggagatgctcggacatgccgatatttccacgacacaaatttatacgcatgtgacgaaaacaaggctgaaggacgtgtacaaacagtatcatccgcgagcttaggagccgctgccagaggggccgcggctttttttgccggattggcggaatacagagaaggttctaattatttgaatcggcattgtcaacaagaatgtaaacggtttatacttgagttgtctgacctctgtaagctacaatggacagatggaagaaaaggaggcttttatgatgtctgaatacaaatataaccgggtatttttaattgtaatggattctgtcggaatcggtgaagcgccggacgccgccgattttaatgatataggcgcaaatacgctcggacatatcgcagagcacatgaacggcttacatatgccccatatggcgcagctcggtctcggactgatcggagacattaagggcgtggaaaaaacggagcaccctcttgcgtactacggaaaaatgcaggaggcgtcaaacgggaaagatacgatgacggggcactgggagattatgggcctctacattgaaaaaccgtttaaagtgttcccggaaggattcccggatgaacttcttcaggaacttgagcggcgttcaggacggaaaatcatcggaaataagccggcttcaggcacggcgattctggacgagctcggaaaagaacatatggaaacgggtgcgctgatcgtttacacatcagcagattccgtgctgcagattgcggctcacgaagatgtcgttccgctggaagagctgtacagcatctgtgaaacggccagagaactgacgcttgatccgaagtacatggtcggccggattatcgcaagaccgttcgtcggagagccgggcagcttcaaacgcacgccgaaccgtcatgattatgcgctcaaaccgttcggccgcacggtaatgaacggaatgaaagacagcggattagacgtcatttccatcggcaaaatttctgatatttatgacggagaaggcattacatcttcccgccgcacggtatctaatatggatggcatggacaaagtgattgaaacgctcggtgaagagtttacgggcctgagctttgccaacctcgttgattttgacgcgctgtacggacaccgccgcgatccggaagggtacggaaaagcgcttgaggaattcgacgcgaggcttccggaagtgtttgaaaaaatgaaagaagacgatctgcttattatcactgcggatcacggcaatgatcctgtccatcacggcacggatcacacgcgggagtatgtgccgcttcttgtttacagcaaaaagcacaaacatacagaacagctgccgcttgcggatacatttgccgatatcggcgcaactattgccgataattttaaaacggaaaagccggaatacggaaaaagctttttatcaagattacagtagggggactttttttgaaacaaaagatcgaacgtgctgctgcatttattaaagaacacgtgaaagaaacaccaaagatcggtctgattttagggtcagggctcggcgtattggccgatgaaattgaaggagctgtcaagcttacatatgaaacgatccctgattttccggtctcaacggtagaaggccatgccggccagcttgtgatgggaacgcttgaaggcgtgcaggtcatcgcgatgcagggccgctttcattactatgaaggctactcaatggatcaggtcacatttccagtccgcgtgatgaaagcgctcggcgttgaatctctcgtcgtgacgaatgcagccggcggtatcaacactgaattccgcgccggcgatctgatgattattacagaccatatcaactttacaggcaccaacccgttaatcgggccgaacgaagctgaattcggagcgagattcccggacatgtcagaagcctatgacaaagagctgtcaagcttggctgaaaaaacggccgatgagctgggcattcctgttcaaaaaggtgtgtatacagctgttacggggccgtcttacgaaacacctgctgaggttcggtttttaagaacgatggggtctgacgctgtcggcatgtcgaccgtgccggaagtcatcgtcgccaaccacgcggggatacgcgtgctcggcatctcatgcatttccaacgcggcggcgggtattcttgaccagccgttatctcatgaagaagtaatggaaatgacggaaaaagtaaaaggcggctttttgaagcttgtcaaagccgtagtcgcacgatctcaaaaataagtcagcataagtcagctgtttcttcggaagcagctgtttttttgtgccctcaacacgaaacattttccagatgaggcgtataaaaccaccggatttggaaaaaataaaaaggattatgaaatggagggctttggagatgaaacgtcttatatccactttgttgattggcattttattaacggcatcagcaccgtccgcttttgcaaagccggacggaaaacatacatcggagctcgctcatgaagccaaaagcgccgtgctgattgaacgcgatacgggaagcattctttataacaagaacagccgggagcgtctggcgccggcaagcatgacaaaaatcatgaccatgcttttaatcatggaagcgcttgacaaagggaaaataaagatgagcgataaagtcaggacgagtgaacacgccgcgtccatgggcggatcacagattttccttgaacccggagaagaaatgacggtaaaagaaatgctcaaaggaattgcgatagcttccggaaatgacgcatctgtcgcaatggcggagtatatcgccggttcagaagaggatttcgtcagccggatgaacaaaaaagcaaaagaattgggattgaaagatacctccttcaaaaacccgacaggactgcctgaaaaagaccattacagctctgcttatgacatggcgaaaatggcgaaggaattattaaagtacgataaaatcactcaatttacgggaacgtatgaggattatttaagagaaaatacagacaaaaagttctggctcgtcaatacaaaccggctgatcaaattttacccgggtgtagacggcgtgaagacgggctttacaggcgaagcgaagtattgtttaaccgccaccgctaaaaaagggaatatgagggtcattgctgtcgttttcggagccagcaccccgaaagaaagaaacgcccaagtgaccaaaatgcttgattacgccttcagccagttcaaaacacacccgctgtacaaacggaatcaaatcgtcggaacggtaaaagtgaaaaaaggaaaacagaaactgatcaagctgaccacatctgagccgatttctcttctggccaaaaagggagagaacatggacaaagtaaaaaaagaagtgaaaatcaacggcaatgtaacggctccggttaaaaaaggagaggtgctcggcagcctcgttctgaaaaaagacggaaaggtgctcgttgaaagcccggtcacggcaaaagacgacatggaaaaagcgggttttctcacttttctgaagcggacgatgggagattggacaaaatttaaataatcatggcgaacgggcactagttttgtcatagtgaaggaattgctttcccgaaaatcgaaacactcattatccgatcatacaaggaggaatgagcatgagccttggaattgactttcatgtcaaagaatccgtgctttgtattcgattaacaggtgaactcgaccatcatacggcagaatcattaaaacaaaaggttactgaatcgctggaggctgacagcatccgtcacattgtgctgaaccttgaagatcttaccttcatggacagctccggcctcggcgtgattttagggcgttataaacaaattaaacagctcggcggagaaatggtcgtgtgcgcgatttcgccagcggtgagacgtctgtttgacatgtccggcctgtttaaaatcatcaggttcgaacaatcggaacaaaaagcgcttttaacgttgggggtggcttcatgaaaaacgagatgcatcttgaattttcagccctcagtcagaacgaatcgtttgcgcgcgtaacggttgcttcttttatcgcgcagcttgacccgacgatggatgagctgacggaaatcaagaccgtcgtatcagaagcggtaacaaacgcaatcatccacggctatgaagaaaactgcgacggaaaggtgtacatctccgttacgctggaggatcatgtcgtctatctgaccatacgtgatgaaggcctcgggatcacggatcttgaggaagcgcgccagccgctctttacgacaaaacccgagcttgagcgctccggaatgggctttaccattatggaaaactttatggatgatgtcacgattgattcctcgccggagatgggaacgacgatacgcttaacaaaacacctatcaaaaagcaaagcgctttgtaattaaggagatttgttatggatgtggaggttaagaaaaacagcaaaaacgcgcagctcaaggaccatgaagtcaaagaattaatcaaaaagagccaagagggcgaccagcaggcaagagacctcctcatagaaaaaaacatgcgtcttgtgtggtccgtcgttcaaaggtttttaaacagaggctatgagccggacgatctgtttcagatcggctgtatcggattattaaaatccgttgataaattcgatttgtcctatgatgtccgtttttcaacttatgccgtgccgatgattatcggagaaatccagcgcttcatccgtgatgacggaaccgtcaaagtatcaagatctttaaaagagctcggcaataaaatacgccgggcgaaagatgaactgtcaaaaacatacggaagagtgccgaccgtccaggaaatcgcggatcatttagaaattgatgcggaggatgtggtgcttgcgcaggaagcggtgcgggcgccttcatccattcatgagaccgtgtatgaaaatgacggagacccgatcaccctgcttgatcagatcgccgatcattcagaagagaagtggtttgacaaaatcgccctcaaggaagcgatcagtgatttggaagaacgggaaaaactcattgtctatctgagatattataaagatcagacacagtcggaagtagccgaacggctcgggatttcccaagtccaggtatcgaggctggagaaaaaaatattaaagcagattaaagtgcagatggatcatacggaaagctgaccttttacgggccggctttttttatttgtgcatcggtggtaatttatggtcttttgcggctgatgaatgagaacaaaagtgaaccacatactacatatataaccacccgaaagatggtgatgcaagatggaaagacgaatatttctcagacttcgccaccgcgtgaaggctcataccggagatatcatcacagtcggcgacgccgcgcagattgcgggacagcaaaagctgaaaaaaaaactgtcggcactgccgctgtataaggtcacgaaaaaagacaaaaatatcgtcgtgctggacatcataaaagtgctgaaaaccattcataccgcttttcccgcgcttgatgtacaggccgtcggcggcgctgaaacgatagtggaaatccattaccagaaaaagcagctgtcagccgttttattcgtcggtgtctggctcctgctttttatcggttcatgtcttgccattatgaattttcatgaagatgtcagtatgagagaagttcatatcgccttatatgaaatcataacgggcgaacggaatgaatacccgtatctgcttcagattccatacagcatcggcctcggtctcggtatgatcgtcttttttaatcacatcttcaaaaaacgcctgaatgaagagccaagcccgctggaagtcgagatgtttaattatcagcttgatctcgatcattatgtcgcaatgcacgaaaatgaagagacgatgaaagatctgcatgatcgttagcattcttttcgttgtatttgtcgggcttggcggagggctgaccgtgggcgcgggctttgtggcttttttaaccgttatgggaatcgtcccccgccttatgcagctgacaaaaacaatgcgctttgtacaggcctacgaaggagcagttatttcaggagctgtgttcggcggctgggaaaccttaaatatgaatcatttttttttatctgaatggctggccgttccggtcgggcttttggccggcatgtttatcggcatgctggccgccgcgcttacagaagtgctgaatgtgcttcccattcttgccaaacggatcggcttcggcagcaaaatcattatattgctgatggccattgtgttcggcaaaatagccggctctttatttcattggctgtattttatccatcattcataaggaggaaccgacgtgacaaacttaaaagaaaattacaaaacaaaagtgaaagactatcagccgaaaccgccatatgtttggaattgcgtcaaagcctttctgatcggcggtttgatctgtctgatcggacaggctcttcaagacttttacatccacttttttaattttaatgaaaaaacagcgggcaacccgacggccgccactcttattttaatttccgcccttttgaccggattcggcatttatgacagactcgggcagtttgccggagcgggttcagccgtgccggtgacgggttttgcaaacagtatgacaagcgcggctctggaacacagaagtgaaggactcgtgctcggagtagcgacaaacatgtttaaattggcgggaaacgtcattgtattcggcgtcgtggcagcctatatcgtaggcctgatacggtttgcttgtgaaaaactgttttcgtaggaggagaaaaaatgaaattaaccggaaagcaaacctgggtgtttgaaaacccgttatttgtaaatgcggcggggacggcagccggaccgaaagaaaaagacggcccgctcggttcgctgtttgataagacatacgatgaaatgcattgcaatcagaaaaactgggaaatggcggaacgtcagttaatggaagatgccatcaactcagctttgcaaaaacagaatttgaaaaagagcgatattgatttgttactcgcgggggatcttttaaatcaaaatgtgaccgccaactacgtcgccagacatctgaaaattccgttcctctgtctgttcggcgcctgttcgacatcaatggaaacgattgccgtcgcatccgcgctcattgacggcggttttgcgaaccgggcgatcgcagccacgagcagccataacgcgacggcagaacggcaattccgcaatccgacggagtatggcgggcaaaaaccggataccgccacttcaacggtcacggggggcggggcggtcatcatcagccaaaacccttctgatatcaagattacaagcgcaacagtgggaaaagtaagcgacctcgggattacggacccgttcgatatgggatccgccatggcgcccgctgccgccgacacaatcaaacagcacctgcaggacttaaaccgcacggcggatgattatgatctgattttaacgggagacctttcaggcgtcggctcgccgatcgtgaaagatttgctcaaagaagaaggctatcccgccggaacgaaacacgatgactgcggtcttctcatctatacgccggaccagcaggtgtttgcgggcggaagcggctgcgcctgctccgcgcttgttacgtacacacatatttttaatcaattaaaatcaggggctctgaacagggtgctcgttgtcgcgacaggagcgcttttaagtccgacaatgatccagcagaaagaaaccattccgaccatcgcgcacggtgtggtatttgagcgggcgggaggtgcatcataaatggaatatctgttggcttttgtttgcgggggaatcatatgcattatcggtcagctgctgcttgacatttttaaactgacacccgcccatgtgatgacaacttttgtcgtcatcggcgccttgttggatgggttcggaatatatgacaaatttatcgaatttgcaggtgcgggcgcgacggttcccattgtcagcttcggtcacagcttattgcacggcgccatgcatcaagctcacgagcatggatttatcgggatcgccatggggatttttgaacttacttccgccggtatatcttcagcgattttattcgcatttcttgtagccattatttttaaaccgaaaggataatgcctgatgacgaaacggaaggtcattcttgtgacagacggggacgtatacgccgccaaaacaattgaatatgccgcggaaaaagcaggcgggcggtgtatttcccaatcaaagggcaatccgtcaaccagaagcggccccgaacttgttcagctgattaaagccgcgccgaatgacccggtgtttgtcatgtttgacgattcaggcctgcaaggggaagggccgggcgaaacggcgctgaaatatgtcgcctcacatcaggacattgaagtgctgggggtgattgcggtcgcttctaagacccatcaggctgaatggacgaaagtcgatgtctccattgaccgtgatggagaagtgacggagtatggcgtcgataaaaccggaatgagagaaatggacgagcacagaatgaacggagatacggtgtattgtctggataaattggacgttcctctcattgtgggcatcggcgacataggaaagatggggagaaaagatgacatatccaaaggctcgccgattacgatgaaggcggtcgaattcattttagaaaggagcgaaagtcatgccggaaaaaccggaaaacatgatcaaggtataccgggatcctagaaaaaatgaacaattttttaaagaccgcgtcggtatgggaacgagctatgatgtcggcgtccgcaaagttcgagtattagaccgggaagtccagatttactttgtcaacggattaaccgatactttgtttatcattcatttaatggaacagctcgtcgacgtcaataattatgatgagaatgcggatgaagcgattgacgttgttgaaaacaggcttgtcaatcagcaggtccaaaaagtcaaaacgctcgacgaagcaacagatcaagtgctttccggacttgtggccgttatcgttgaagacgcgggcttcgcctttatcgttgacgtcagaagttaccccggacgcacaccggaagaaccggatacggaaaaggtcgtccgcggggcaagagacggttttatcgaaaatatcgtcattaatacagcattgatcagaagacgaatcagagacgaaaggctccgcgtcaaaattacgaaagtcggcgagcgctctaagaccgatcttgccattgtgtatatagaagacatcgcggacccggaccttgtcagcatcgtcgaaaacgaagtgaatgcgattgacattgacggattgacgatgtctgataaaacagtggaagaattcatcgtcaaacagggctacaacccgtttccgatggtcagatacacggagcggccggatgtggccgccaatcacattttggaagggcacgtcatcatcgtcgttgatacgtcaccgagcgtgatcataacgccgacaacgatttttcaccatgttcagcatgcggaagaatacaggcaggcgccttcagtgggaacatttttaagatggatcaggttcttcggtattatcgcttcaacggttctgcttccgatctggtttctctttgttctcgaaccgtctcttctgcctgaaagattggattttatcggtttaaataaaaatacgcacatcccgatcattctgcaaatctttttagccgatttggggattgagtttctcaggatggccgcgatccatacgccgaccgctttatccaccgccatgggtctgattgcggcggtgctgatcggtcaaatcgccatagcggtggggctgttttcagcagaagtgattctgtatgtatcgatcgccgccatcggatcatttaccacgccgagttatgagctcagcctcgccaataaaatgatacgcctcatcttaatggtgctcgtggccattttccaagtgaaaggctttgtgataggctttacattgctgctgatcataatggcgaatatccgttcgtttcatacgccgtatttatggccgtttttaccgtttaacggcaaggcgctgtggcaggtgctcgtccggacgacagtgccgggagcgaaagtcagaccgagcattgttcacccgaaagaccgtcaaagacagccaagcggttcataatcgcattgaaaccgacagaagattatgatattgtatgtcttaacttatacgggacttgtataaggacagctcaaaagaagctgtccttttcacccataggcggatcagaaagagggaatgagcattgttcttacatggcacaagcagacaaaacaaactaggtcatttggaaatcggaggtgtggacgcgctgtatttagcggagcattacggcacgcctctttatgtttacgatgtggctttaatacgtgagcgcgctaaaagctttaaacaggcattcattgacgcggatttaaaggcgcaggtcgcgtacgcgagcaaggcgttttcttccgttgcgatgatacagctcgctgagcaggaggggctctcattggacgttgtatccggcggagagctgtttacggcggttgcggctggttttccggctgacaggattcattttcacggcaacaacaaaagcaaagaagagttgaaaatggcgctcgatcatcaaatcggctgcatcgtcgttgataatttttatgaaatatccttactcgcggaactgtgccgcaaatcagggcgcacaatggatgtgcttctccggatcactccgggggtagaggcccatacgcatgattatattacaacggggcaggaagattccaaattcggttttgatctgcataacgggcaaatagaaaaggcgattgaacaagtattgcagtcagaccatatccgccttctcggcgttcactgccacatcggatcgcaaatttttgatacggcgggctttgtgctggccgcagaaaaaatctttgcaaaactgaatgaatggagagaatcattcggctttgtctctgaagtgctgaatttagggggcggcttcggcatccgctacacggaagaggatgaaccccttcatcccgccgtttatgtggaaaaaattatcgaagcggtaaaagaaaacgcagcgctgcacgcttttgacattccggagatctggattgaaccgggacgctcgctcgtcggagatgccggaacgacgctttataccatcggttcgcaaaaagaagtgcccggcacccgtaaatatgcagcggttgacgggggcatgagcgataatatccgtcctgcgctttatcaggcgaaatatgaagccgtatcggcaaacagaatcggagaacaccacgacaaaacggtatccatcgcgggtaagtgctgtgaaagcggggatatgctcatttgggatatagaccttccggaagtgaaagaaggcgatcttctcgccgttttctgcacgggagcgtacggatacagcatggctaacaactacaaccgtattccgcgtcccgccgtcgtttttgtggaagacggcgaagcgcatcttgtcattagaagagaaacttatgaagacattgtaaaactggatctgccgtttaagactggggtcaaacaataaataaaaaagagaccggaacaatggcgtccggtctctttttgcgttcagctgtcagaacttgatccgctgtctcctgtaaatacagacacgatcgcattccaaatcgaagcgaagaaatcaataactttttgaacaaagcttttgccttcatcggattgaatgaacttcgtgattttgtcttttgccttatcgagctggctgccgacttggccccaatcaatctttgcatttttcattttattaaacaatgaaacgagctggtctttttgagcgtcagtcagtgtaatgttaaggtttgaagccgcatcatcgacctttttctcgattccttcttttgtatcgggcacaccgtttttcgcgaaatcatctttaatgtttgcgataagcgcggaggcgtttttatccccgattttatccccgagatttgaagtggtgacaagctcttggttggcgacctgttttacatcttctgaaatcgctttgtctgatgagacttcatatgccttgatgattcccgttaatgctgcggtgcctgatacctcaaacggcgccgtcacgtatactttcgcatctttcactcctgctgtcatcagggcgtttaagtacatttcatccgtaatggaatcgatattatgggtcttaacgtcaagcccggaccctttctttgccaccgtaatggatgacgaagagatggctcttgtgccgatttgggcattcgatatatattttcccagatattcatgttcttctttatttgtgaccgtcacttttgtcgcgttatcagggacatttaattcgtcaagcactttctgacggttttcgtttgacagatccgcccccagtgtgacgatgacatctccgactgcggcatcggccaggctgattttcggtattgtgcacaatacaacggccgccgccagcaatccaatccacatttttttcaaagcggttaacctccttcttttcacaaatgccgttttgaagcggtttgtgaggacctgcgagaagcagttccgatacatagacggctgtgaagctgttctggtttcattttctttctgcggaagcggggagattcgttttccggctgaaggtgtggtataatagccgcgaaaagaagagcagaggcctcttccttcaaaagaatatcaaaaagaaagccggcttacaattgaaattcatattaaagaaggctttgacaaaaaacaatacggaagtaggaatgagaatgaaaactggttacatcgaaatggaaaacggcagcagaatcgaatttgaactttatccgaatgaagcgcctaatacagtcgctaactttgaaaatctggcgaatacgggcttttatgacggcgttattttccaccgcgtgattccgggctttgtcagccaaggcggagatccgactgggacaggcatgggcggaagcggaaaaacgatcaaatgtgaaacagaaggcaatccgcataaacacgaagccggttctttatcaatggcgcatgccggtaaagacacgggttcaagccaattcttcatcgtacatgagccgcagccgcatttaaacggcgttcatactgtattcggaaaagtgacaagcggtttagagcatgcgaaaaacatgtctaacggagacaaaatgaaagaaatccgtgtagaaggataatgacggaaaacccgcctttttcaggcgggttttttttatgtatatgaaaattctcatgtgtaaatcatgaaaaaatacatatatgaacatcggtgatcattctggtatagtgaaaaagaccgattacaacaatgaaaagaggtagaaacgttggttcaattggcaaccgttttatttgtcattatcattctcgcacttatgatttggttcagggtaaaaaagggaaacaggccgattaaaggcggcggcttaggcatcattctcccgcttttgattatcgccgtcatttttacattcagtatcagccagctcatgaatatcccgggaaagccgtttcattttcccgctctttgggagctcgccatcgccggactgttaggcgcggtattcggtatcatcatgctgtcgcaaaccgcctatgaaatccgggaagacggctttgtctactccaagcggaataaaaactttaaatatgtcattatcgcgattattgcgatccgtatcgcactcagccaatatttcaaaagcattgacgcggctgaattcgccgttttaacgatggagcttgcttttgtgtatttgtgcatttggcggatcggaagcttcgtgaaataccgtaaaatcagcagatccggcttataaaatgaaaaaaagggatggggtgcggggcttatttgccctctgtgcagggattcatggtaaaataaaaatgaccatggctaatgggaggaaatcacttgaaatcagaaaaagaaaaaacttctaaaaaaagcgccgtacttgattgggcgaaagccattatcatcgctgtcgttctggcactgctcatccgaaactttttatttgccccttatctcgttgatggtagatcaatggatccgacgctgcatgaccgcgagagaatctttgtcaatatgacggtcaaatacataagcgacttcaaacgcgaccagatcgtcgtgctgaacggagaaaatgagcactatgtcaaacggattatcggacttcccggcgacacggtgcaaatgaaaaacgatcagctgtatatcaacggcaaaaaagtgtccgaaccgtatttagcggcaaataagcacaaggcgaagcaagacggctatgaccggctgacagaagacttcggcccggtgaaagtgccggacgacaaatatttcgtcatgggtgataaccgcagagaatctatggacagccgcaacggcctcggtctttttacaaaaaaacaaatagcgggcacatcaaaattcgtcttcttcccgtttaacgaaattcgcaagacgaaataaaccgtacaggcagttttcttcatgagaaaactgctttttttatataaatttatctctccaccctcaaaaacagaacataaattcgtatatctatttaatagatagaaagttttacagatacatgaaacatcttccctttatgaaacgttatatgaataactcacgcagggaagaacggttttctattcatgaaaaaaaggaatatgacatagtaatgaatagattgatacgggctggaggtagaaaaatgggaagaattaaaacaaaagcagccattttacttgtactgctgctgttattagcgggcggttatatggtcataaacgatattgaactgaaagacgtgccgactgcaatcggacaaaccctgtcccaggaaaaagaagaatatacagtcaaaacatataaaattacgaaaatcgaaggaactgagtaccacggtacggcagcgaacggcacaaaaattatttttaacggcgacaagctgaagcaggatctctccgatgtgcaaaaaggtgataagattaaagcgtatttcagcaaatcaaaccggattgacggcttattgaaggtcgtcaaagtgaacgaataaataaagacgccttttatgggaaaagggcgctttttatttttctgaataatgaggtgcaaattcattgcgcctgccgcaaaggatgttataatagcggataaggacaaaaaaatattgattgtatccttcggggctgggtgaaaatcccgaccggcggtaataaggcgctttgcgctttacagcccgtgacccgtatgcatctgtatacggtggattcagtgaaaagctgaagccgacagtgaaagtctggatgggagaaggatgagagaagctatgcaaaaaataaacttactgtatagtcttatttcctatggattaaaactggcaaagccccgaactgtgtaaacattcggggcttttttgacgccaaattgcgtggaagaagggagggataacaatggatgaatattatatgaatacggcaatagaacttgccagacgcggtgaaggacagacacagtccaatcctcttgtcggcgctgtcgtcgtcaaaaacggacagatcgtcggaatgggcgcccatttgcaatacggagaagcgcatgccgaggttcacgcgattaatatggccggcagacacgcaaaaggcgccgatttgtatgtgacgctggagccttgcagccattacggaaaaacaccgccatgcgccgaactgataataaagtcggggataaaaagggtgttcattgctgtgaaagatccgaatccgcttgtagccggaaaaggcatcggaatgctggaagcagcgggcatcgaagtgaaaaccggccttctcaggcagcaggcagaagagctgaataaaatgtttcttcacttcatgcggaccggacttccgtatgtcaccttgaaagcggccgcgagccttgacgggaaaacagcgaccgaaaccggtgacagcaaatggattacatcagaggcggcaaggcttgatgcccagcaatacaggaaatcgcatcaaagcattcttgtcggagcaggcacagtcaaagccgataatccgagcctgacctgcaggcttcctgatgcggtgaagcagccggtcagagtgattctcgatacaaagctgaccattcctgaaacggcaaatgtgctcactgacggcgctgcgccgacatggatatttacggccaaaggtgcagacgtgcaaaagaaagaccggctgaccgcactcggaataaaagtttttccgctggaaacagaccgcattcacatccctgaggtgctcagtgttctcgctgaaaacggaataatgtccgtttatgtggaaggcggagcatccgtacacggaagttttgtgaaggaaggctgtttccaagagcttcatttctatttcgcccctaaattaatcggaggaacgcttgctcccagcttgatctccggtgaaggttttcaatcaatgaaagatgtcccccatttgcaattcacacaaatcacccaaatcgggccggatataaaactgacggccatacctaaagatggaaaggatggtgacgatgtttacaggaatcgttgaagaaacaggcacgatccaagcaatcgaaaagacaggcctttccatggcattaaccatcgccgcttcaaaagtgacaagtgatgtgaaacttggcgacagcattgcggtaaacggcatctgcctgaccgtaaccggattttctgacaatcaatttacggttgatgtcatgccggaaacagtgaaatccacttcgctgaacggcttgtcaaaaggcagtaaagtaaacctggaaagagcgatgtccgccaacggacggttcggcggccactttgtatcagggcatgtggacggaacggcggaaattacgcggatcgagaaaaaaagcaacgcggtctattacgatttaaaactttcgccggaattgacaaaaacgctcgtattgaaaggttcaattacggtagacggcgtgagcctgacgattttcggtctatcagatgaaagcgtgacggtatccatcattccgcataccatctcagaaacgatttttcagacgaaaacagtcggatcgaccgtaaatattgagtgtgacatgatcggcaaatacttataccgctttttgcacaaaacagaacaaacgaaaagcaatcaaactatcacggaagcctttttaagcgagaacggcttttagaaaggaagatcgatatgtttcatccgatagaagaggcgttagaggcgctgaaaaaaggtgaagtcatcattgttgtcgatgatgaagacagagaaaacgaaggagatttcgtagcgctggctgagcatgccacgcctgaagtggtgaattttatggcgacccatgggagaggtctgatctgcacgccgctgtctgaagacatcgccggccggctggatcttcacccgatggtcgatcataatacggactcacatgagaccgcctttacggtcagtattgaccacaggctgacaaaaacgggcatcagcgctcaagaacgttcttttaccattcaggcgctgttgaacgaggaatctgtgtctgacgattttcagcgtccgggccacattttccccttaatcgcaaaaaaaggaggcgtcctgaagcgggcgggccatacggaagcagccgttgaccttgcaaaagcctgcggatctcagggagcgggcgtcatttgtgaaattatgaatgaagacggcacaatggccagagtgccggagttagccgaaatcgccgaacgtcaccagctgaaaatgattacgataaaagacttaatagagtaccgttacaacattacgacacttgtgaacagagaagttgatattacgctgccgactgacttcggcacgtttagagtttacggatatacaaacgaggttgacggaaaagaacatctcgcctttgtcatgggggatgtcccgtttaacagcgaacccgttcttgtcagagtgcactcagaatgcctgacgggcgatgtgtttgcatcccatcgctgtgattgcggacctcagcttcatgccgcgcttgcgcaaattgctgaagaaggccgcggcgttctattgtatttgcgccaggaaggcagaggaatcggtttaatcaataagctgaaggcgtaccgattgcaggaacaagggtacgacacggttgaagcgaacgaagcgctcggctttctgcctgatctgcgcaactacggcatcggcgcccagattctccgcgacttaggggttcagcatatgaaacttttaaccaataacccccggaaaatcgccggcctcgaaggatacggtctcagcatttcggaacgggtgccgcttcaaatggaagcgagtgagcataacaagcagtatttacagaccaaaatgaaaaaacttggacatctgcttcatttctaaaaacaaatctcacaaaaaaggatggataacatatgaatatcatacaaggaaacctagtaggaacaggacttaaaatcggaatcgtcgtcggcagatttaatgaatttataacgagcaagctgttaagcggagcggaagacacgctgcttcgccacggtgtagaatcaaacgacattgacgtcgcttgggtgccgggagcgtttgaaatcccgtttgcggcaaagaaaatggcggaaacgaaaaaatacgatgccgtcattacgctcggcacggttatcagaggagcgacaacgcattatgactatgtctgcaatgaagcggcaaaaggcatcgcccaggcgggaacggcgacgggcgtcccggttatcttcggcatcgtgacgactgaaaccattgagcaggccatcgaacgagccggaacaaaagccggaaataagggagcggattgcgcagtatctgccattgaaatggcaaatttaaaccgttcatttgaataatttgttgaaaagcgtttaaaaccgcggcgaaaatgatataatgtgagaaaacggatcgcctttatgtatccgtttgataggacatgaatggacattttggatatagaggggtttttatgttaattcgttataaaaaatcgtttgaaaagattgcgatgggtcttctgtcatttatgccgaatgaaaaagatctcaagcagcttcagcagacaataaaggactatgaaacggatactggccgccagctctttctttggaaagaggatgaagatatcgtcggagcgatcggagtcgaaaaaaaggactcagaggttgaaatccggcatatcagcgtgaatccttctcaccgccatcaaggaatcggaaagcaaatgatggacgccttaaaacgtctgttcaaaacggaggcactcgttccgaatgaattaacgcaaagcttttttgaacgctgtcaacatcaaaaagatcaggatatctcatataataactgacaaatgctcccggaatcttcacggtttcgggagctgttttgatatagaaaaagcagggctgaccgtcagcctctgcttttttttcttctctcaatttcccgttcgcgttccttaatgacatccgtcctgtcccgcaggcggtgtttatgaataagaaaggtatctgatacgccgtcttgcccccatgtatagccctttcggcggcattcggcaagacatgcttctttcagggcttcatctgtaatcggaagcataacacttctgtaaggcaggcccgcttctatatcgtctgacagcgtttctatcagctcaatcagcttcggatggctgagaccgagagaacagaccgcctgcttttcagaccggagaatacgtaagctgttggcaatcagccgtttcgccccggcttcatttcccctgcgctggtgatacagagcgacggcaagctgaatcaggccgacccaatgaatgctccgcttttcagccgggctttctttccaatattcctctaacagttcatgacattcaaaataatctcttgatgcgtgaaattcggccaaaaagccgatataagctttaggatacaagccgcttcctccttttatgctaaaaccagtgtaccacagcgctttgaaaaggaaaaaagagcggcttggtgtctgaagcctgaggaactagcagatgtaagatgctcctacgacaacgagcaaaataaacagaacgacaattaatgcaaaacctccgccgaaacaagctccgctcatgtgaaatcagcctccctttgtttcaagtttacacggctatcctatgtgcatccgcctttaaaggtataggcgtatatcttctttttcagtattttctaaataacggaggacgtgtataaaagtattggacgagagcatttcggtggattatactaaagggtagccagtttttccggcaatgagagtgatactgaaaatggtgagataatggtagaatatcaagtgaaaattgatacgtttgaaggcccattggacctgctgcttcatctgattaaccgtcttgaaatcgacatatatgacatacccgtggcaaccattactgaacaatatttattatatgtacatacaatgcaagagcttgaacttgatgtcgccagtgaatatctggtcatggcggcgacgcttctcagcattaaaagcagaatgctgcttccgaaacaagaagaagagctgtttgaagacgaaatgcttgaagaagaagaccctcgggacgagctgattgaaaagctgattgagtatagaaagtataaaaccgctgcgaaggatttaaaagagcgggaagaagaaagacaaaagtcatttacaaagccgccgagtgatttaagtgagtatgcaaaagaaatcaaacagaccgagcagaaactgtcggtgaccgtttatgacatgatcggcgcgtttcaaaaggtgcttcagcgtaaaaaaatcacgcggccgaaagaaacgaccattacaagacaggaaataccgattgaagacagaatgaaagaaatcgtaaaaagcttaaaaacggcggggagaagaataaacttcacggagctttttccttctcggcaaagggaccatctcgtcgtgacgtttttagcagtcctggaactgatgaaaaatcagcagattatcattgaacaggaagaaaacttttcagatatatacattacggggagtgaatccattcatggcgtttgatatcgtgaattggaaagcgattgtggaagccctgctgtatgcggcgggtgatgaaggactgaccaaaaagcaattggtgacggtgcttgaaatagaagaagcggaactggccggaatcatggaagaagtggccgctcagtacaaggaagacgacagaggcatcgagcttaccgaatatgcggatacgtatatgcttggaacgaaaaaagaattcgtgccttatttgaaaaaactaatcgaagtgccgtcaaaagggctgtcgcaggcttctttggaagtgctggcgatcgtttcgtacaagcagccgatcacacgggcggaaattgaagatatccggggcgtgaagtctgagcggattctgcacagcctcgtgtcaaaagcgctgctgtgtgaggtgggccgcgccgacggtcccggccgggcgattttatacggcacgacaccggtatttcttgaacaattcggcttaaaaacattggaggagctcccgccgcttcctgaaaatgcggaggaagacgttctccaggaggaagccgatttattctttgaaaacttcaaccaaacttttgaggatattaaataataatcgtttttcatcatacgatagtagggaaaggccattgatgaatgacgcaaatgacgacgtacaagagaggaaggaaacggacggaaatgggaaattcgattgtgagggcccatactgaagaaactggtgaatttttagccgaggttgtcacgatggtcagcagctatttaaatcatacaacattgccggagatgcgggctcaaggagaggcggatgaggcatactgccgcgacgtgctcagtgtgctgaggaggatgaccgtcttttgcgaaggcgcccaggaagcctgccggcggctcttaatgcaggagccgtttcatgaggtgagagcggaaaaaacgctgtataaagtgtatcatcagtgcgtggaagaatttttcatgccaaaaaaggatacatggtacgaaaacagccgcgccgcttatacaggccaaagcgcgattgagttctaccagcaagtgccggactcgctgcggagccttctgctttcgctcagcagtgaatttctgcggatgcgggaagaattggcgcaatatgaagcatcaggctcaaatatggcatcagtcagataaaaactcttccttttgggagagtttttttatgtgaaagtgatgcaattggtattcataagtcatggacaggcgcataaacttgtacaaacccacaacaaggacgtgagcattcatgcgctttctcaaaaaagctgccgtatttcttttgacttttgttattcttttttccattacagacggcaatacggcacatgcccaaatacatgtcagcgcaaaaagcgcgattattatcgacggagcatctggcagggtgttattcgccaaggatgaacatcataagcggcggattgcaagcattacgaaaatcatgacggcggtgctggcgattgaatcaggaaagatggaagagaccgtgacggtttccccgaatgctgtaaaaacggaaggctcagccatttatcttcagccgggacaaaaagtaaagctgaaagatcttgtatacgggcttatgctgagatcaggaaatgacgccgctgcggcaatagctgaatatgtcggcggaagccttgacggttttgtatttatgatgaacaaaaaagccgagcaaatcgggatggaaaatacaaaatttcaaaatccgcacggactggacgaccatgaaaatttatattcaacggcgtatgacatggcgcttttgactaaatacgcaatgaaaatcaaggaataccggaccgtttcaggcacaaaagtgtataaggcggaaacgatggaccgggtatggaaaaataaaaacaagcttctgactgggctctaccgttacagcacaggcggaaaaacgggttacacaaaaatcgcgaaacggacgctcgtttcgacggcttcaaaagacggaacggatctcatcgcggtcaccataaatgatccggatgactgggatgaccatatgaatatgtttaattatgtctttgaacactataaaacctatgtcgtcgctaaaaaaggcggcattccgaagctgaaaaagacgttttacggaaaacacgcttttattgcccgggatgtcaaatatttattaaaagaggatgaaatcgacgatgtaaaaatccgcacaaccttaataaaaccgaaaaaagcctggaaaaaggacgcctctctcattcctgatgtcgtcggccggatgactgttatgcatgatgggaaagtgatcgccaagattcccgtctattatgaaaacgagcgccataaaaaaccgaaaaagcatttcattgagacgtttacgagcctgtttatgagcgcggcgggcggttcgtcatggtcaatttaatctgggtatgtctgacggtaatcggacttgtctttgcgatgtttaacggtaccttgcaggatgtgaatgaagctgtttttaaaggagcaaaagaagcggttacgatctcgttcggattaatgagcgtgctcgtcttctggctcggcctgatgaaaatagccgagcagtccggccttttggatatattcagcagaatgtgccgcccgtttatctctaagctgtttcccgatattccccctgatcatccggccatggggtacatcttatcaaatctcatggcaaactttttcggactgggaaatgcggcgacaccgctcggcattaaagccatggagcagatgaaaaagctgaatggaggtaagtctgaggccagccgttccatgattacctttttggcggtaaatacttcgagtattacattgataccgacaaccgtcattgccgtgcgcatggcttattcggcgaaatcaccgaccgatatcgtcgggccgaccatcttagcgactttaatttcgggaatcggcgcgattttcattgaccgctacttctggtaccgccgcaaaagaaaagggaggtaagcgaatggaaatggtgaattggctgtctttagccatgattccgattattatcgccggtatattgatatacggcacgatcaaaaaagtgccgacgtatgaatcattcgttgaaggcggaaaagaaggaattgagattgcgttttccatcattccgtatttggtcgggatgctggtggcgattaccgtattccgggcctcaggcgcgctggattttgtcatggggctgtgcaagcctttctttacagcgctcggcattcccgcagaagtcgtgccgcttgctctgatccgcccgatttcggggacggcggcgctcggcatgacgacagatctgatcgccgtgtacgggcctgattcatttatcggcagactggcctcggtcatgcagggatcgactgatacgacgctgtatgtcctgacggtgtatttcggggcggtcggcatcaaaaaaatgggggatgctttaaaggtcggtcttcttgctgatctgatcggggtggttgcatcaatcatcatagttgcgttattatttggaagcgcctgaaatcaggcgctttttatatatcagaataactctccttgaaaaagcttgtttgttcaaggggaaaaaagtaagattatacttgaggtgaacgacatggaaagactgcaaaaagttattgctcatgccggcgtggcatcacgcagaaaggcggaagagctgataaaagaaggaaaagtaaaggtgaatggaaaagtaataacagagctcggcgtaaaagtgaccggttctgatcagattgaagtaaacggattaaaggtggagcgggaagaacccgtgtactttctgctttataaaccgagaggagtgatctcagcagctgatgacgacaaagggcggaaagtggtgaccgactttttcaaagaagtgccgcagcgcatttatccgatcggcaggcttgattatgatacgagcggacttttattgctgacaaatgacggcgagtttgccaacaaactcatgcatccgaaatacgaaattgataagacgtacgtcgccaaagtgaaggggattccttccaaggaacttctgagaaagcttgagcgcggcattcagcttgaagaaggcaagacggcgccggccagagcgaaaatgctttccctggacaaaagaaagcagacgagcattattcagctgacgattcatgaaggccgaaacagacaggtccgccgcatgtttgaggcgatcggtcatgacgtgctgaaactcaaacgtgaagaatacgcatttttagatttaagaggcctgcgcacaggagacgcaagagaattgacgccgcatgaggtgaaaaggctgcgggctttagctgaacacggtaaaaacgctttctaattttcacataaccttcaaaaattacaaaacgtgtagatgatataattgaatggatttgcagacaggggaggggagcagtgtacaatgaacaaaaaacggcggcgtttattcattcggaccggcatccttctcatcttactctgcgcgctcggatataccatctataatgccgtttacacaaacggagagcgtatatctgaggggtccaaagccccgaatttcgcgctgaaagatacagagggcagactcatagaactgagtcagttaaaagggaaaggtgtttttctgaatttctggggaacgtggtgtgagccgtgcaagcaggaatttccctacatggagaatcaatacaagcattttaaagacctcggtgtcgaggtggttgcggtaaatgtcggcgaatcaaaaattgcagtacataattttatgaaaacatacggcgtcaatttcccggttgcgctcgatactgaccggcaagtgctggacgcgtacggcgtatcacctattccgacgacatttttgatcaatcccgacggaaaggtcgtgaaagtggtgaccggcacgatgacagaacgcatggttcatgactatatgaatttaattaagccggaggcgtcttcatgaaaaaggtcaaatgtgagtgcgggcacgtgaatccagccgggacggttttgtgcgagtcgtgcgggaagccgcttgatgatcaaaaatcgccgcttgccgatatgcggtacgacggcagcgcaaggcgttcgcaaacatataacaaaacaatcgtagataaggtatggaacttcttttcttccgtaaaagtcggaatatggctgatcgtcattactctggcggcgtctgctttcggcacggtttttccgcaggaagcttatctgcctccgggcgcccagccggatacatattatgaacagcagtacggcataatcggccaactgtattatttgctggggtttcatcacctgtacggctcatggtggtatatgctcctgatcgcatccattggcatatcactggtcatctgcagcctggatcgggtgattcctttgtacagggcgcttaaaaatcaaggagttcggcggaatccggtctttttgaagaggcagcgtctatacagccggacagaaaccgagctgagcggggatgcggctgatagcctcagaacacgattgaaaaaaaagcattatagagtgcgagaacaagagggaagcatcctggcggaaaaaggccgtttttcaaggtggggaccctatgtcaatcatatcggcctgatcatttttctgatcggagccatgctgagatttgtacccggtatgtatgtcgatgaaacgctctgggtccgtgaaggcgaaaccgcccagatccccggtacagacggcaaatattacttaaaaaacaaccggttcacgatgcagacatataacaaagacactgagaaaaaagtattcgccgacgccattgacagagccggaaacggcaaagtcgccaaatccttcacaacggacgcggttctgtacaagagggaaggcgacattgtattcggtgaaaagccgaagcttaaaagagtcaaagaaaacaatatccgcgtcaatgaaccgctgcgctttgactcctattctgtgtatcaggtggactataaagaaaaccagctcgatcagatggtatttcagctgatcgaccaaaaaacaaaacagtcattcggcaaactgaagatcaatcttcttgatcccgacacggactacgatcttggtaacggttacaaagtgcagattgccagttatcttcctgatttttattttaacaaagacggagaaccgagcacgaagacgaaggttcctaacaatccggcttttgtctttaaaatcacggctcccgacaagccgaaaggggagaaaagttttgttgcgattcagcagactgttgaaggttccgaaagtaacaagtacaaattaaaattcgaccatgtggaaacgaaaaacattacaggactcaccgtcagaaaagacttaaccttatgggtgcttgccgtcggcggcgcgatctttatgatcggcgtcattcaagggatgtactggcagcacagaaggatctggatcaaaacaggtgatcatgaagtgcttgtggcgggacatacgaacaaaaactggttcggtctgaaaaaggatatcgaatttgttcttagcgggaccgggattcaagagccggccgatcaaaaagaattggccaaaaatcaggcctagtgaaaaaggagtggtgtcatggcggagctgagcgcaaattttctttatgctgcctttttgatttatttaattgccgtcccggttttcggcggcgccatccggggaacaaaaggtgcgaaggacggtaagggccgctggtcggctatcggaatcacgttaaccattttcggatttctttgtcacctcggctactttattgcgagatggtcggcaagcggacatgcgcctgtcagcaatatgtttgaatttacgacgtcattcggcatgatgcttgttctcgcttttattattatttactttatttacagactgccttcattaggcatgttcacattgtctatcgcgcttttgcttatcgcatatgcaagcatgtttccgacagacatcacgccgcttattccgtcactgcagagcaattggctgtacattcacgtcacgactgcggcgctcgggcaggcgattcttgcgatcagttttgtagccggcgtcattttcctgttaaagcatgtcgaccaatccagaccgggcaaaaaaacgttctggcttgaagtcatcatgtttatactcgtgacgaccgtggcatttatcgccgtcacgtcggcattccggctggcggactacaaagcagaatttaattgggtggataaaaaagaggctaaaagcgtgatgatatatgatatgcctgcgcttgtcggcccgcatgacggagaactgcttacggaaggcgcaatgaagccgcttattgagcttccggccattttttcaggcagaaaggtcaatacggtgatctggtcgtttggcgcaggtctcgttttattcggggcgctcaggctgatattcagaaagagaatcagcgctcttataagcccgctcgtcaaaaatgtgaatctggacttggtcgatgaagtcggctaccgcgctgtttccatcggttttccggtattcacactcggcgcgcttgtgtttgcgatgatttgggcgcagcttgcatggacgcgtttttggggctgggacccgaaggaagtatgggcgctgatcacctttttattttacgcagcgtatttgcacttgcggctgtcaagaggctggcatggcgaaaagtccgcgtggcttgccgtcatcggcttcgccattattatgtttaacttaatttttgtgaatctcgtgcttgccggacttcattcgtacgcatagatgcaaaaagccgatacagttctcaagctgccgcacagtttgttaaaatgaaagtaacagaaggaaagcagggggaaaacgatggatcaaacaaatgaaactaaaatattagtagtagatgatgaagccagaattcgacgccttttaagaatgtaccttgaacgggaaaactatgtgattgaagaagcggaaaacggagacgaggccattaaaatggggctggcatcagattatgatctggtgctcttggatttaatgatgccgggaacggacggaatagaagtatgccggcagctcagagaaaaaaaagcgaccccgattatcatgctgacggcaaaaggggaagaagccaaccgcgtccaagggtttgaagcgggtacggacgattatatcgtcaagcctttcagcccgagagaagtggtgcttcgggtaaaggcgcttttaagaagggcttcccaaacatcttatctgacagccaataccccgacaaaaaatgtactcgtcttctcgcatctatccattgatcatgatgctcacagggtgactgcggacggcacggaggtgagcctgacgccgaaggaatatgaactgctgtacttcctggcgaaaacaccggacaaagtgtacgacagggaaaagcttttaaaagaagtgtggcagtatgaatttttcggagacctcagaacggtggacactcatgtcaaacggctccgtgaaaaattaaacaaagtgtctccgggagcggcgaaaaaaatcgtcaccgtctggggagtcggatacaaatttgaggtaggcgctgaatgaagttttggaaaagcgtagtaggaaagctttggtttaccattctttcactcgtgttaattgttttatttattttaacggtgctgcttctggaatttatagaaaattaccacgttgaagaagcggaaaaagatttaacgcagcttgccgataaaattgcggtcataatagaaaatcatgaagaccagccgcttgccagatccatcacgtgggaactggcggacaatttaacgagcatcgcgatcattcaggatgataagcatgtctggtattcgcccaatgacgataatcatttatcctctattacattagagcagattaaacatgaccgggatctgcacaaggcgctgacagaccgcaataaagtaagcaaacgcgcggtccccaaaaatgccggttcggataatgaacggctgatcgtcggagtgccctatgaaaaagacggcaaaaaaggcatggtctttttatcccaatcgctgcttgccgtcaaagatacgacgaaacatacgacacgctatatttttcttgcggcgggcattgccatcgtcttgacaacgtttttcgcattctttttatccagcagggtgacatatccccttcggaaaatgcgggaaggcgcccaagacttggcgaaaggaaagtttgatacaaaaattccgattctgacccaagatgaaatcggggaactggccattgcctttaatcagatgggacggcagctcaatttccatattaacgcgctgaatcaggaaaaagaacagctgtccaatattttaagcagtatggcagacggggtcatcaccattaatatcgacggcaccattttggtgaccaacccgccggccgaacgttttctgcaggcatggtattatgagcagaacatgaacattaaagaaggagacaaccttccccctgaagcaaaagagctgtttcaaaatgcagtgaacacggaaaaagagcaaatgattgaaatgacgcttcaaggaaggtcatgggttttattgatgtcgcctctttatgcggaatcacacgtccgcggcgccgtggccgtgctccgtgatatgaccgaagagcgcaggctggataaattgcgtgaagacttcattgccaatgtcagtcatgagctcagaaccccgatttctatgctgcaaggatacagtgaagcgatagtggacgacattgcaagcaccgaagaggagaaaaaagaaatcgcgcagatcatttatgatgaatctcttcgtatgggccggctcgtcaatgatttactggatttggccagaatggaatccggacatacgggtctgcgctatgaaacggtaaacctgcatgaatttctggagaagatctcccgcaaattttccggtgtagcgaaggaaaaaggcgtttcgctcacagaggacatctcggtgtctcagccggagtgtgtctttgacgaagacaaaatggaacaggtgtttaccaaccttatagataatgcgctgcgccatacggagtcaggcggaaacgttcatatcgcggctcataccgtaaaagacggactgaaaatcgatatcaaagattccggctcgggaataccggaagaggacctgccttttatttttgaacgtttttataaagcggacaaagcaagaacaagaggcagggcagggaccggactcggactcgccatcgtaaaaaatatcgtggaagcccacggcggctcaattgcggttcacagcagcatcgacaaagggacgacgtttacattttatattccgacaaaagcgcaggatgacgtctgaaattgacgaacaatcttgttccatacgaaacacccgcagaacatgcgggtgttttttgtttttttctcctttaaaaatttaagaatatgttaatataaattcccttccaaattccagtttctcgtaatatagttgtaatgtaacttttcaacgcatttttacgacaaaaaagtgaacggaggggtttcccatggaagaaacctttcagatattatacgatgcataccatcaagatttatatcaatttttattttatatggtaaaagataagtcgcaggctgaagatttgacgcaggaagtgtatatccgcgtcttgaattcctatcatacatttgaaggaagaagcagtgaaaaaacatggctgttgtccatcgcacgccatgtggcgattgactggttccgcaagcagcagacgatcagacagcgtattatgggtacgtttgattgggatacacaagatgtcagagatcagcatttgcttccggacgaactcgccgtacagcatgaaaatgtccgggaaatttataccgcgcttgatcattgcaccattgatcaaagagctgttattatcttgagatttattcagggatattccattcaggaaacagccgccgctctccgcttctcggaaagcaaagtcaaaacgacccaacacagagggctcaaaatacttcggaaacagatggagcttttgagggaggagctaatggatgatgaagtcatattggaacgaagaaagagtagaggagttgttaagacaacttccggcggttagagatcatcgttcacccgaggccatttaccggaatattgaaacgggtaaaccgtacaggaaaaaaccggcccgaagctggatcggccccgctgcagccggcatctgcgcattgtgcatcgctctgattatttctcctcacctgatgacaaacaaatctgccggtgatcttacagctgacagcggtcaagctgaaaaagccagtcagtcagctgctgtcaagccggatcagaagacgtttgtcgtttctaacgaaaacaaaaacaattacattactttggcgtttgccgattcagatacatccgccgtcattccggtcagttttgaaaaaaagaagcctgacgaatcggtttcagaggcattatctgatgcaggaaacttagaagtgcccgaatctttcctctctgtgccgaaccttttggacggtgtgcaggtaacggcggataagaaggatttgcttgtgcaggtaaacggacgtctttctatcgaatcagctgccgattctgatttattgaaaaagatgctgaaagagactttgacatggagtccttacgagcggattaaattgaaaaaggttcaaaacggagacggacaggatttttataaatcttacggcatttccgctgagatgtccgtacataaacagacaaaccgggcgtatttttcttacagcgacagtctgggacaagagtatctcatcccgtctgaacaaacctattattcagtatatcaggctattgacgggatgaagacaacagacggaggctcacagaccgcgagcattatagaagcagatgcgattgcatcggtatcggaaagggaagacggcgagcagctgcggatccaattgtccgaaaaacataaagttgaagattcgctggaaggcattttaatgatcgaagggcttttgttaaccgcgaaggaattcggttattctgaggtgctgttcacacatgcgcacgcaaagaaaatcggtaattatgatgtgacaaaaccgattgctgtgcctgccgcgcctaatccgcttccgacccattaaacgtaaaaaaacccaaaacatatgaatgttttgggttttctgttggttacggaaggtcaatcagtttaacggaaacaatatcctgaaccgaagtcagctcattgacgactttatcatctaaatgtttatcaaaagaaagcatcataatggcttctccgcctttttctttacggcccacctgcatggtagcgatattgatatcgttatcgccgaggatgcgtccgacgcgtccgattacaccagtcgtatcctggtgctggatataaacgaggtggccggcaggatttaagtcaatattaaagccgttcagttcaacgattcgttcaccgaagtgagggatatacgtagccgttaacgtaaatgtgctccggtctccggttacttttacgctgatgcagttatcatatcctgattcattggaggaaatcttctcgctgaagctgataccgcgttcttttgctacaccgcccgcgtttacttcattgaccgttgagtctacacgcggttttaagaaaccggacagcaggctttttgtaataaatgatgtttcaagtttggcgatggtgccttcatattgaatcgcaacatctttgacgggttccttcatacattgtgatacgagacttccgattttatcggcaatttggtgataaggctggatttttttgaattcatctttcgtcatcgcaggcaggttgatcgctgacatgacaggcagaccttttgcaaactgcagcacttcttcagaaacctgtgccgcgacattcagctgtgcttctttcgttgaagcgcctaagtgaggtgtggcgatcaccagcggatggtcgggaagctttgattcaactggcggttccacttcaaacacatcaagggcagcgcctgcgacatggccgctttccagcgcttccaaaagcgccgcttcatcaataatgccgcctcttgcgcagttgataagacggacgccttttttcgttttggcaatggtttctctgttaagcaatccttttgtttcctttgttaaaggcgtgtggacggtaatgatatccgcgctttcaagcacttcttcgaatgtccggctgtttacgccgattttgccggctctctcttcggttaagaaaggatcgaatacatgaactgtcataccgaacgctctggcgcgctgggcaatctcgcttccgatccggcccagaccgacaatgcctaaagtctttccgtagagctccgccccgacaaaagccgtccggttccattctcttgattttactgagatattggcttgcgggatgtgtctcattaatgaagaaatcatcgcgaatgtatgctctgccgttgaaatggtgtttccattcggcgcgtttatcacgataactccatgttttgtggcctcatcaatgtcgatgttgtctacgccgacaccggctctgccgacgatttttaaagaagtcatctttttaaacaattcttcggttacttttgtggcactgcggactaacagggcatcaaaggtatgtaattcatcttctgcatccgcgacgtttttttgaacaatttctataaagtctgattccatcagcggctttaagccgtcattgctcatcttatctgagaccaaaactcgaaacattgttagatttcctcctagtttagctgactaaatatctgataatttatcatattctcaatagagtgtcaatgtgtattgacgcagtaaaggagaaaaggaaaccgctgaatcagctgaaattgggcttccccaatattttatttaaatttgagcagttctctatacaattacaatttgatcatatataatgtgaataaattcataagatcaatcttcggggcagggtgaaattccctaccggcggtgatgagcgtcacgctctaagcccgcgagctgcttcggcggcaggatccggtgagattccggagccgacagtatagtctggatgggagaagatggaggttcagcagacgttttgatgcttatatcaaacgtttctttgccaagccttagtaagctcccgctttttaacaaaagcggtttttttattggggcgcaaaagaacctttcctcttttcgagagatttgatcgaaaaggagagagcattgtgaaagtaaaaaaattagttgtcatcagtatgcttagcagtattgcgtttgtgcttatgctgttaaatttcccgtttccggggctgccggattacttgaaaattgatttcagtgacgttcctgcaattatcgctattttggtttacgggcctgcggcggggattgcggttgaagcgattaaaaatattctgcagtatatcattcaaggaagcatggccggcgtgcctgtcgggcaggcagccaattttatcgcggggacgctgtttattctgccgacggcgtttatgtttaaaaagctcaattctgcaaaagggcttgcagtgagcctgctggccggaaccgcggcgatgaccgtgctgatgagtattttgaactatattcttatcctgcccgcgtatacttggtttttacattcaccggcattgtcaaacagccagttgaaaacggcggttgtcgcaggaattctgccgtttaacattgtaaaaggcattatcatcaccatcgtctttacgttcatctttacgaagctgaaaccttggattgaacaaaaacgcagcatccaaacacaataaaggcttaaagcgtccgctctgtgaagaacagccggacgctttttttgtttgtgctgatcggcaaaaaaataagactccggccgataacagccggagtcttattcaggacgaaaaagctcctctcacggggagggcttttttattcgtatttcagcgggtcgccttcgaacggttcatccgcaactttgattgaatcagtagggcatccttcaaatgcgtcaatcatatcttcttccagaacttccggaacttcgacgacacctttattttcgtcaagcgtaacgaacgcaatgccttcatcatcataatcataaatgtctggtgccgcagctccgcaggcgccgcatgcaatacacgtatctttatctacaattgtgtactttgccatgaataaaacctcccagattgttcgtgttggaacaaatggtttaccttatatatttttaaatataacacctattcctcttacttattgtaatgatgttagtgtcaaatttcaacagaaaaatgattgagaatgcttatcacataagggattctctttagcacttccccctaaaagatgactttaaacgtcaaatttatatgaaaatctgttaaaataaaaagaaccaaaaaacgaaacttgtcacaaaagaaatgtaggtgtgtttagattggcgataaactactttgataccgtggttctcgactgtctggacaaaatagacggcgaacggactccgagtgctgtgtttcatttattaaaaggaaaaaagtcgtctcaaaccattcaggatgccggcttatttcagatcgctaaatatttcggcatggcttcacagtgtgaacgcggcgatattgcggcttctatgcatagactcaccgagaactcatacatcacagccggaaaagaagagggaacgcggaaagtgactgcgcgcggcgttcaaaggcttgaacgggcgtttgctgagcggccttggccgaagcactgccacggcgcaaattatcaaacgcctgccgtcatcctgtggaggcggctttccctgctcattcaagtcctgtcaaacaaagagcatcaatgcagtcaatatatcccggttaccaacgatgtgcagacgctgagatgggtcaaatggttcatgcggaaaaacagagatgctaaagagctttccgtccaaatgcatgacgcgctgtttcagcttctgcaaggcgtaagtgaacggcaggcgcttatttttgtctattctttaacttcattcaacagaatcggcaaaacgaataagcagctcgctctccagctgaacgaagatgaatggtatgtgtccgtccagttttggggagcggtacattatgttattcaatcgcttccgcaatgtgcatatcccgctctgcgcgagctgttgtccgatctgcaggcggaaagcgcgctgacacagtctgccagaaaaacctttgagctgttggaaaaagggtttccgattgaacggatcgccgcggtcagaaatttaaaaaccgccacaatcgaagatcatatcgtagaaatatcattgcatcagcctgcattttttatagaacagtatctttctgaagaggaacagcgtatgataacggcatttgcaaaacagcatcaaacaaataaaattaaacggattcgcgaaggaatgcagatgcgcttcagctatttccagatcaggctggcgctggcaaagacggtgaatcagcatgactgagctgcataaagctttatccagatattttggtttgcattcctttaaaaaagggcaggaagagattatgactagcgtgctccaaaaaaaggatacgatcgccatgcttccgaccggcggggggaaatcattatgctatcagctcccgggttacatgatggacgggctggtgctgattatttcaccgcttctttcattaatggaagatcaggtgcagcagctgaaagcaaaaggagaaaagcgggttgcggcattaaacagcatgctgaattccgcagagcggcattttattctcagcaacatcagccggtataaatttctctatatgtctcctgaagccctttcttcaccttatgtactgaaccgtttgaaaaacgttccggtcagtttatttgttattgatgaggctcattgcatatcggaatggggacatgatttcaggcctgattattcgaagctcgggcctttcagacaggcactcggaaagccgcctgtattggcgctgactgcaacagcgacaaaagaaacgctcagagacgtgacggatgtgctcggacttgagcatgcggtgcgtcatctttattcagtcaaccggccgaatattctcctggcggcagaacatttggctgataatgccgaaaaaataaacaggctcacggagcttgccgaaaagcttgaaggccccggtatcatatattgtccgaccagaaaatgggcggaagagcttgcggctgagctgaatgaaaaaacgggaaagcggacggattattatcacggcggaatggatacaggggacagaatcttgatccagcagcaatttatccataaccagcttgattgcatctgctgtaccaatgcgttcggcatgggtgtggataagtcagatatccgctttgtcattcacttttatcctccccaaacggctgagggctttatgcaggaaatcggcagagcgggacgcgacggcagcccgagtgtcagtattttgctgagggcgcccggcgataccgagcttcagcagcagattattcagacagaaagcctgtctgattatgatctggaaggcattttggccgtcatacgggatgccggtacggatgatgagcgaaagcttcgggacgttctgatcaataaaggcgtccaggaaacacaggcgcgaacggccgtccatctgtatctgcaaggaaaaaccacaaaagagcagctgcaggaagaactgacataccgcgtggaaaagaagctgcgtaaaatgaaccgtttttcggcgttattagagcggaaagaatgtataagaaaagcgctgctgtcttattttgatgaatcgtatgagcctgaaggccaaaccggacaatgctgcagcagctgcggacttgatctggctccgtacgagcaaaaaggagaacggaaaaacatggaacggtttgaagattggaagctggaattaggccggattttcggttcagagtctgcgggtgagttcagctgagacggcaaagcgaattgatccagcagctctcagaccgggagattgtgatacagctgtatgccacccaattgctcatattggcggtttcagctgttatcggctttttctttttcaccgacattcacgattttttaaagctgtggcatatacgtgacgataatatcatatggtacggtgtaactcttgccgtccttgtcatttttgccgatctggcggtgatgaaatggtgtccttcgcatttatatgatgacggcggcattaatgtattgctttttaagaacaggccggttctgcacattttgtttttgacgcttctcatttcgttcagcgaagagattttgttcagaggcgttctgcagacacatatcggcttatgggccgccagcttcatttttaccgtgcttcatttcagatacttggcgaagtggcttctgtttatgatggttgcgggcatcagtcttttgctggggcttatctatgaatggaccggcaatttattcgttccggttacagcgcattttattattgatgcggtatttgcctgtcagatccgttttcaatatgttaggaggggtttgcatgacggaaatgtcaagagttgaaagaagaaaagctcagcagcgtgccgagcagcaggttgccgcggccgcggatgaacaaattgaatatcttgaagacagcctcccgacaagacaatctgtaaaagaggagcgtaaaaaaaaggaagagcaggtgaaggaaaaaaccaaaacaaaaacgccgctgttcacttttctgaccgtcctgttcattatcgtaacaatcggtgtctttttcggtcttctttatatgacgaacagcagcagatttgacccgaaggactatgaagatgtcttcatagaccacagtgaaagcgcgcctgccgttattccgaaaggcgctcagaaagatacgtcagaaaccgctcttttagaacaaccgaaaaaaaagtctgacgacaaagataagaaagaagcggctgcatctgaaaaaacaaaagaaaaaccaagtgaaaaaacacctgaaaaaacggaaacgtcctcagaaaaacaagtaaagccgacagacaccgaatacgcggagacaaaacagcagtctccgccggctgtccgtgaaaaagcggctccggctgccgcaagtgatcaagctgggactgtcccgaaaaaagtgcggaccgtacagcatactgtacagccgaaagaaacgctttaccgcatttcaatgaaatattataaaagccgggcgggcgaagaaaaaatccgcagctacaacggattaaacggaaacgacgtgtacaccggccaggttctgaacattccgctgtctgattaaaataaatgcatgttttcaccgcgtttttcatatagtgtactaatgaaaacggacaaggtgtgaagcgcatggattctttatggaagcaattagaccgatttgctgacggaccgacgaaacaaatgcttcaggcgctggtgaaacggaaattaaaatacgaaaattatgccgcacaatgccgaagatggcagtgggcgtccctcgtttgtttttccctgatgtgcatactgctgatgtttaaaagctttaatgccccccaagcctctccgcagctgattctgcaggaaatattaggccatacggtttatttgtgctggattatggcttccgcttttgcgtattgcacttcttattattttaaaaaaaaggaagaaaaagctgagggtgaatttcataaactgagatgtgaaattatccaaaaaagcacggatttatggccccagcctgaaaaatggagggcgagagaatctgtttttcacttgatgaaacatcggtatgatatcaatctttattttgaaagcaaataaaatgaggcgttttccggaaaggatagaaacgtctttttttgtttgtccgtctaatgtaagacaatgacagaatggagagtgcgtttatgaagctaacagcgggaattctcggctcattggcgggagcggctgcggttatggcggccgtcatgtacaaaacggcaaacggcagccatctgaaaacacatacatttacgcttgataaaatgaaagggatgaagccgctcaccatcttctttatatctgacgtgcaccgccgtttaattgatgaaaagcttctccgcgaagcggcagtttataagccggatgccgttttgctcggcggtgatttggcggagggcggagttccttacgccagaattgaagaaaacatcaaacgtctgacggctctcgcgcctgtcatttatgtgtggggaaataatgattacgaggtcagccagcaaaaattgctctcacttttacgggcatacaaagtgattccgctgagaaatgaatcggttcagtttgcttataaaggggaaaccgttacgatctgcggggtggatgatatcaggatgatgatggatgattacgaagctgcaatcagatatacggatgctgataaagtaaaccttctgctttgccataaccccgacatccatgagcagatgagggagtcagacgggattgacgctgtgttcagcggccatacgcatggcggccaaatccgtttcggccggttcgggccgtacgaattgggcggggcgggaacggtaaaaaaagcgcattatctgatcagcaacggctacgggacgacaaaagttccgctgaggctcggggcgaagccggagacgcatatgattacgctgtgcgggccggatgagccgttttcctgaaacaaatccggccgcggtgataaaaaacggcattctgcttgtcttcccgctgtacacggtgtaaactgataacaaattaagaacctatgactcatttattcatatactgtgttatatgatttgtgtgcaagaagaggcaggagggaacattatgcggcttgagcgtctgaactataataagattaaaatctttttaaccctcgacgatctgactgatcggggactgacaaaagaagacctctggaaggactcgtttaaagtccaccagttatttaaagatatgatgaatgaagcaaatacagagctcggctttgaagcgaatggtccgatcgcggtggaagtatattctcttcaggcacaaggtatggttgtgattgtaacgaaaaatcatgacgcggacgcagaagatgacgaatatgacgatgattatatcgagatgcaggtcaaacttgacgaaagcccggatattatttatcagttccattcgtttgaagatatcattcagcttgccggaagccttcaccgcatcgggattaccggcggcaccgtctaccattatgagaaccaatactatgtaagccttgaagacctcggctcccgttccgccgaaggtgtcatcgcggtgctggctgaatacggacacccggcgacaattacgatttacaggctccatgagtacggaaaactcatcatggacggcaatgctgtggaaaccatccagaaacatttttcataaaaaagatttgaaacggcagctgttttcagcggccgtctttttttaagcgaaataatggaaaaatcattgtctttcttctatgcacggagatattgaaggtgtatactagtcactgaaagggagcatgagagaaacagaagattttaggaggttaactcaaatggcagccgatcgattcaccggtcataatgaagaagacaaacatgatgtattaaaatcaacccaaaccgtaatacataaagctctggaaaaattggggtatccagaagaagtgtatgaactgctgaaagagccgctcagattattaacggttaaaattcctgttcggatggatgacgggtctgtgaaaatatttacaggctatcgtgcgcagcacaatgattccgtaggtccgacaaaaggcggcattcgttttcacccgaatgtaactgaaaaagaggtgaaagcactttccatctggatgagtttaaaatgcggaattattgatcttccttatggcggtggtaaaggcggaattgtttgtgatccgagaaatatgtcattcagagagcttgaaaggctgagcaggggatatgtaagagcaatcagtcagattgtcggaccgactaaagacgtcccggcacctgacgtatttacaaactcacagattatggcttggatgatggatgaatattcaagaattgatgaatttaactcacccggctttattacgggaaaaccgcttgtactcggcggatcccacggcagggaatcagcgacggcaaaaggcgtcaccatctgcataaaagaagcggctaagaaaaaaggtctcgatattcagaacgcgcgtgtcgtcgtacaaggtttcggaaatgcgggcagctatctggccaagtttatgcatgacgccggcgcgaaagttgtcggaatttctgacgcgtacggaggcctttacgatccggacggtcttgatattgattatctgcttgaccgcagagacagcttcggaacggtgacgaagcttttcaatgacaccattacgaatcaggagctgcttgagctggactgtgatatacttgtcccggcggcgatcgaaaaccaaattacagaagaaaacgctgaccgcatcaaagcgaaaatcgtggtagaagcggcaaacggaccgacgacactggaaggaacgaaaatcctgacagacaaaggaacgctgctggttcccgatgttctggcgagcgccggcggtgtaacggtttcttatttcgaatgggttcaaaacaaccagggcttctactggagtgaagaagaagtcgaggaaaaactggaaaatatgatgataaaatcgtttaataatatttatgaaatgtcccaaaaccgccggattgacatgaggcttgcggcttacatggtcggcgtgcggaaaatggctgaggcttcgcgtttcagaggctggatataaaccaatcgtttgcataaacaaaaaaaatctcctatgataatataggagattttttatatgagtggaaacttatgatggaaatgccaatcgcaggagttgaaggacatgacagaagaaaaagcaattataataggcggaggtccttgcggattatcggcggctatacatctgaagcaaattggcgtgaacgcgcttgtgatcgaaaaagggaatgtcgtaaacagcatttataactatccgacgcaccaaacttttttcagttcaagtgaaaaattggagatcggcgatgtcgcctttattacggaaaacagaaaaccggtccgaatacaggctctctcttactacagagaggttgtcagaagaaaagagctgcgcgtaaacgcctttgaaacggtggagcgcgtaacgaaacaggaagacggccgttttcttgtagaaacgtcaaaagaccgctacctcactccgttttgtatcattgcgacaggatattatgatcatccgaattatatgaacataccgggtgaagggcttcctaaggtatttcattactttaaagaaggccatccttattttgataaagatgttgctgtgatcggcgggaaaaactcaagtgtggacgcggctttggaactcgtgaagtccggtgcgcgcgtcacggtgctctacagaggacatgagtattccccgagcatcaagccgtggattctgcctgagtttgaggcccttgtcagaaacggcacaatccggatggaattcggcgcttgtcttgaagaagtgacggaagatgaaatcattttccgctccggccgaaatgagacggtccggctgaaaaacgatttcgtatttgccatgacgggataccatcccgatcacggtttcctcgaaaaaatcggtgtgcagattgatgctgaatcaggccggccgtttttccgggaagaaacgatggaaacaaatgttgacggtgtttttatcgccggagtcattgcggctggaaataacgccaatgaaatttttatcgagaacggccgttttcacggcggcttgatcgcaaacgaaatatcaaaacggctgggtgcagagagcatatgatcattcatatgctcttttttaaaaaattgaaagatgtaaaaatatgaacaacatggtaccatagatataggaatataaaggaaagaggttgcctgatgtttgcaatcatctctgcaggaattgctcccggcattgcgctgttaagctatttttatttaaaagatcagtatgacaatgaacctgtacatatggtgctgaggtctttttttctcggggttgtccttgtgtttccgaccatgtttatccaatatgttcttgaaaaagagcatgtggggggaggaagctttttcgtttcgtttttgtcttcgggatttttggaagaatcggtgaaatggttcgttctgatgatcagtgtgtacccgcatgctcattttgatgagcattatgacggaatcgtttacggggccagtgtgtctttaggctttgccacgcttgaaaatattctgtatttattcggccacggcgttgagcatgcttttataagagcgcttctgccggtctcctgccatgcgctgatcggagtgattatgggattttatctcggaaaagcccgcttttcgcagaaaaaagcccgtgtcaaatggcttgtgatttcgctggccgtgccttcatgtctgcacggttcttacgattttattcttaccgccctcaatcattgggtatattatatgctgccgtttatgctgtttttatggtggttcgggctgcgaaaggcaaaaaaagcacgctccgtcaatatgatccaagtgtgaagaaaccgcgcatcgcgtgcggtttctttttttatgccttgatgagggataagaaggaaacggtgtataaaaatatccgcgtgacagacaatacgggtacactttaaattttgcagtaggaggcttgaagagatgaagtgcaaaggagcctttatggcatgtctcattctattttctttcgccgccgctttcttcgatcatcatgaaacggttcatgcgttttcaaatcaagtgattcaaagaggcgcgacgggtgatgatgttatagaattgcaggcccgtcttcaatataacggattttataacgggaaaatcgatggtgtttacggctggaccacatactgggccgtgagaaattttcaggagaaattcggcatgaagccggttgacggcctcgtcggggcgaaaaccaaacaggtgctgatttcaaaatcaaaatattaccgtgaatatgtaatggagcagatccaaaaagggaatacgttcactcattatggcaacgtcccattggaaaaccaaacaaaaccgagagccggagcgcagaagcctgcggaaacgaataagcctgctcaaaagccgcaaaacaatacaggcggtcagtcaaatcaaaagcaaaatacgacagcggctaatatgcctggcggtttctcaaacaacgacatcaatcttctggcgcaggctgtgtacggggaagcgcgcggtgagccgtttgaaggacaggttgccattgccgcggttattttaaaccgtattaaaagcccgttatttccgaatacggtggccggcgtcattttcgaaccgctcgcgtttaccgccgttgccgacggccaaatatacatgcagccgaatgaaagagcaaaagaagcggttcttgatgcgattaacggatgggacccttctgaaaacgcgctttattatttcaatcctgatacggcgacaagcaaatggatttggggacgtccgcagattaaaagaatcggaaagcacattttctgtgagtaaaagtacgcaaaatgaggtgttaacatgattagaggaatcattatcgctgttctcggtgtcgcgatcgccgcaaccggatactggggatataaagagcatcaggaaaaagatgcggtccttctgcacgcggaaaataattatcagagggcttttcatgaactgacgtaccatgttgatcagcttcacgacaaaatcgggacgacgcttgcgatgaacagtaaaaaatctctgtctccggcgctcattgatgtatggagaattacatctgaagcgcataacaatgtgagccagctgcccctgactctcatgccttttaataagacggaggagtttttatccaatataggagatttcagctataaaacatccgtccgggatttagaccaaaaaccgcttgataagaaagaatatacaacactgaacagcctgtacaaacaggcggagaacattcaaaaccagcttcgcagcgttcagcatctcgtcatgagcaaaaatttacggtggatggatgttgaaatggcgctcgcctctgacaaaaaacaaagcgataatacgatcgtcgacagctttaaaacagtcgaaaaaaatgtaggcgctttttctgaagacagcatcagccccacatttacgggagcaaatacagaacgaaaaggttttacgcatctgaaaggaaaacaaattacggaaaaagaagcggtaaaaatcgcacaacggtttgcgcctgatcataattattccattaaagtggtcaaaagcggccggaagacgaatcgcgatgtatacagtatccgcatgaatgacgcggatcacaaatcttttatctatatggatattacccaaaaagggggacatcctgtctatttgattcaaaaacgggccgtgaagaaacaaaagatcagcctcaatgaagcatctaaccgggctgtcgcgtttttaaagaaaaacggatatgaaacaaaaggtctcgaaattgatgaaagcgcgcaatataataacatcggcgtcttttcttttattcccgtggagaaaaacgtccgcatttatccggaagccatccgaatgaaagtggcgctggatgatggtgaagtcgtcggtttttccgcgcgtgattacctggcggcgcaccgcacgagaacgattccggctcccgctttgtcagctgatgaagcgaaagcgaagctgaataaaaatgttgaagtgcgggagacccggcaggcgctgatcacgaatgaactcggtcaggaagtgctttgctacgaaatgctcgggacgatcgggaaagacacgtatcaaatgttcattaatgcggacgacggaaaagaggaaaaaatagaaaaattaaaaagcgcagagcctatatataaagacctataaaaataaaggaggaaaggactaaaagtcttttcctttttttcattacatgctttaataaaagcataaataatgaaagagtgaaggccatgatagctgtcggagattatatttggattgaatacatagagaacaatgagcccaaaaaagcgaggagtaaagcagtaagcgttgaaaacggcgaactccacatctcatatcccgtcgatctggattcgggacggacggtctttttgcataaaggattggaaataacagcggaatttatggggaatggccaagtaccgtatcaatttaaaagcataattaaaggaaagaaaaaagaacccatcccgatgatcggattggacatcccccctcaggaggaaatgaagcggattcaaagacgccgatacgtccgtgcagacgcagtattggatgtatccgtcaaattggaagcgaaaaaaaccgcttttcaaacggtttcctctaatatcagcgccggcggaatcgctgttgtgatgcctgagcatatttccgcggaaccaggtgaaaagctgtatgtctcattttctcttcccggcaaggaaaatggggcggatataacggccgaggctcttacccagcggattttttatgatgaaaaggcggataaacaaaaaatgacgcttgaatttacagaaatcggccccgcagcacagcagcttttactccaatattgtatgcgcgcgcagctgcagcagagaagaaacagtctgtcggaataaacagcagcgcacttttccatactaatcctaatggaggtgcgcgtgtatgaaaacatttgaacgtctgctggtcaaattggtctgcattcagcttataattttgggcgcggtgcagtttttgcttcattatcagcctattgaaccttatatttcgaaagctgtgaaatatgagggagttgataaaatggagaaaaaagaatggattgaaacggtaaagcggtaaatcagctcaattttttcgccccttttccggcagttcatgatacaatccatagaggagtaaagagcaaggagagagattatggacaagaaattatcaattgcgatcgacgggccggccgctgccggaaaaagcaccgttgctaaaatagtagctgagaaaaaatcatatgtgtacattgatacaggggcgatgtatcgtgccattacatatacggcactcaagcagaatgccgatttaaccgatgaagccgcgcttacagagcttttgaagcgtacggaaattgagcttgtatccgctccggaaagacaaatcgttctcgtaaacggagaagatgtgacagaagaaatccgaaaagacgaagtcagcaaccaagtatccatcgccgccaagcataaaggcgtcagagaagaaatggtcaaaagacagcagcagctcggacaaaaaggcggtgtcgtcatggacggccgtgatatcggtactcacgtgctgcctgatgccgaagtgaaaatttttctgctcgcgtccgtagaggaaagagcgaagcgccgatatgaagagaataagaaaaaaggctatgacgtgaattacgagacgctcattgaagaaattgccagacgcgacaaactcgattcagagagggaagtttccccgctgcgcaaagcggaagacgcgattgaaatcgatacgacgtcactcagcattgccgaagtcgcaggaaaaattctggagatcgtcgaacagaaatcacgttaacttcgggcggagcgctttttaatttttttcaaaagacaagatgttattgcttgacaaaccagtccttttattagaagttaatactaataaaactttttattgatcattcaaaatcttttttggatgattctttaatacatattcggctgaaaagcggacattcacatgttcagctttcaaaccgtattaattaagctgtgtaggtttggaccaaggaggttattcaaatgacagaggaaatgaatcaaattgatgttcaagtgccagaggttggagatgtagtaaaagggattgtgacaaaggtagaggacaagcatgtagatgtcgaaattgtcaatgtcaaacagtccggaatcattccaatcagtgaattatcaagtcttcatgtagagaaagcatcggatgtcgtaaaagttgacgacgagcttgacctgaaagtaacaaaagtggaagacgatgctttgattttatctaaacgtgccgttgatgctgaccgcgcttgggaagaccttgaaaaaaaattcgacacaaaagaagtgtttgaagctgaagtgaaagatgtggtgaaaggcggtctcgtcgttgatatcggcgttcgcggcttcattcccgcatcacttgtcgaagctcatttcgtcgaggatttcactgactataaagggaaaaccctctctcttatcgtcgttgaactcgaccgtgataaaaaccgggtgattctgtcacaccgggctgtagtggaaaaagagcagacagccaaaaagcatgattttctccaaacgcttgaggttggaagcgtgcttgaaggaaaagtgcagcgtctgactgatttcggcgcatttgtcgacatcggcggaattgacgggcttgttcatatttcgcagctgtctcattcacacgtcgaaaaaccgtctgacgtggtggaagaaggtcaggacgtaaaagtgaaagtgctgtccgtagaccgcgataacgagcgtatttctttatctattaaagaaacgctgccgggaccttggagccagatcggcgaaaaggtaaaacagggagatgtgcttgaaggaaaagtgcagcgccttgtaagcttcggcgccttcgttgaaattcttccgggcgtggaaggacttgtgcacatttcgcaaatttccaataaacatatcggaacgccgcatgaagtgcttgaagaaggacagactgttaaagtgaaagtgcttgacgtgaacgaaagcgaagagcgcatttccttaagcatgcgtgagcttgaagaagcgccgaaagccgatcaggaggacttccgtcaataccaggcgaaagaagagccgagcaccggcttccagcttggcgatttaatcggagacaagcttaataaattaaaataaattggtgataaaacgtgacacgagcagaacgaaaaagagaacatataaatcatgcgctgtctaccggccaaaaccgggaaacggggcttgatgatattacgtttgttcatgtcagcctaccgaacctagcattggaaaaagtggatatatcaacgaaaatcggcggactcacaagcagttcgccgatttttatcaatgcgatgacaggcggcggcggacagcttacatacgaaattaacagatcgctggcaagagccgcgcgcaaagccggcatgccgctggctgtcggttcgcaaatgtcggctttaaaagatccctccgaacggtattcttacgagatcgtcagaaaagagaatccggacgggctgatatttgccaatttaggcagcgaggcggatgccgagcaggcaaaaagagcaattgatatgattcaagcggatgccctccagattcatttaaatgtgattcaggagatcgtcatgccggagggagacagaagctttaccggcgctctcggccgtattgagcggattgcggcggaagcgggagttcccgtttttgtcaaagaagtcggcttcggaatgagcagggagtcggcacggcagttatttgatgccggtgcggcagcagttgatgccggcggatacggcggtacaaatttctctaagattgaaaatatgcgcagagagaaggcgcttcaattttttaatacatggggaatttccactgccgcaagcttagcggaaatccactcgctctccgctgatcaatcaattatcgcatccggcgggctgcaaagtgccctggatgtcgccaaatcgattgccctcggcgcttctggcgcgggaatggcaggcactttcctgaaagctctcacctccaaaggagaagaggggctgtttgacgagatgacggtgcttttacaagagctgaaaatgattatgaccgccctcggatgccaatcggttgcccaattgcaaaaggcgcctttggtcataaaaggtgacacacatcactggctttctgaacggggaattgacacatcccgtttcagcagacgttaaaaggcatgcgaacccgcatgcctttctctgttttttacgattttctttttcggaattcaccgttttgttcaaggctcgtcgctcctttatggtgaattgaatcatcgcgatcagattccacccggcgggaggctttcagttttttctcctgtctgtcttttcccatttttatccgctcctttcaggcataattggtttaaaaaatgcgttcccgctccatactggtcagaggaggagcgattatggaaccgttttattattactggtcaatgtggtttttatggatacttgcgacttttatttttgccaaaacaaaaagccgtttttacgtatcagtctttattttgactaatatgatggcaagcatacatcagataacggcttattttacgctgaacgcggcatatgtcatgttttttgctgcggcatttgtttatgcgggaagcctcggcatgcataaacggctccgtcatattgtgattcatctgacggcggctgcggcgtacggctttatttttctttttgcattatatgaccctgtttggtttatcataaaacctgaatgggcagcggttatactgcttaccgttattacgctttctgttgaggggcggttccctgagaggctttgtctttttgttctcggcatgtgccagggggagttattgtatgctgcggtcatccgcaacattgcgggggcagcagccgtcggtgattataaatggctatcaggctgttcggcgggagtgattcttctcgtcgggctgactacatatgaacagcttgcggcgcgcatcagccaaaaaagcaaaaagcagggcaaaggagcgacaaaaatgtcttgaaaacagacggagactgttacatgaatacgaaacattttgaagaatacattgtgatctcagtgaaaactgatataataaatgagttaagcccttctgtttgaagggttcttttcatagcgaagatgattattaataaccggttgaacaattttttgtgaaaatgtaagcggctggattgaaaggaagggtactatgggtaaacctgtcgtagccattgtcggaagaccgaatgtgggaaaatccacaatctttaaccggattgcgggtgaaagaatttcaatagtagaagatacccccggagtgacgcgggaccggatatacagttcggcggaatggctgaattatgattttaacctgattgatacgggcggaattgatatcggagacgagccgtttctgacacagatccgccagcaggctgaaatcgccatggacgaggctgatgtgatcatctttatggtgaacggccgcgaaggtgtgacgtctgcggatgaagaagtggcaaaaatactgtaccggacgaaaaaaccggtcgtattagccgttaataaattagataataccgaaatgagagcgaacatttatgacttttatgcgctcggctttggagaaccgtatccgatttcggggacacacggtttaggattgggagatttgctcgatgcttgtgccgagcattttaaaaacattccggagacgaagtacagtgatgatgtcgttcaattctgcctgatcggccgcccgaatgtcggaaaatcatcccttgtcaatgcgatgctcggcgaagagcgggttatcgtgagcaacgtagccggaacgactagagacgctgtggatacggcgttcacttacaatcagcaggaatttgtaatcgttgacacggcgggaatgagaaaaaagggtaaagtatatgaaacaacagaaaaatacagtgtgctgcgggcgttaaaagccattgaccgctcagacgtcgtcggcgttgtgctgaatgcagaagaaggcatccttgagcaggacaagcggatcgccggatacgcccatgaagccgggaaagccgtcgtcattatcgtaaacaaatgggatgccgttgataaggacgagcgcacgatgaaagaatttgaacagaatattcgggagcatttccaatttctcgattatgcgccggtgctgtttatgtcggcactgacgacaaagcggattcatacactcatgcctgcgattattaaagcgagtgaaaaccactctctccgtgtgcagacaaatgtcttaaatgatgtcatcatggatgcggtcgccatgaatccgactccgacgcacaacggctcccgtctgaaaatttattatgcgactcaagtcgctgttaagccgccgagcttcgttgtttttgtcaacgatccggaactgatgcatttttcttatgaacgctttttagaaaaccgaatccgggacgctttcggatttgaaggtacgccaattaaaatatttgcaagagcaagaaaataaaaaggtgtgatacagagatgaaaaaagtggcaatgcttggagcgggaagctggggcactgcactttctttagtgctggctgataacggacatcaagtcatgatgtggggacaccgtgccgaattgatcgatcaaatcaacgaactgcatgaaaacaaagattacctgccgggtgtggagctatcaagttctatcatcgggacagccgatttaagcgaggctttaaaaggagctgacttcatcattgtggcagtaccgacaaaagccattcgggaagtgctgaaaaaggctctgccgtatatcccgaaacaatcgatttttgttcatgtcagcaagggaattgagccggattcgcttctccgcatttcagaattaatggaggaggagctgcctgaggagtacagaaaagacatcgtcgtgctttcagggccgagccacgctgaggaagtcggattaagacacccgacgactgttacatcatcttcaaaaaatatcaaggctgcagaagcggttcaggatttattcatgaaccagcatttccgcgtctatacaaatcccgatatgatcggtgttgaaatagggggagcgttaaaaaatatcatcgctcttgcagcggggattacagacggattgggatacggagataatgcaaaagcggccttaatcacccgaggtcttgctgaaatcgccagactcggcacaaagatgggcggaaatccgctcaccttttccggcctgaccggcgtaggcgatttaatcgtgacgtgtacaagcgttcattcccgaaactggcgcgccggcaacctgctcggcaaaggatataagctggaagctgtcctggataagatggggatggttgttgaaggcgtgcggacgacgaaagctgcgtatcagctgtctcaaaaatatcaggtgaaaatgccgatcacagaagcgcttcaccaagtattatttaatgggcagaaggtagaaacggccgtagaatccttaatggccagagtgaaaacccatgagatggaagacttggtcaacacattcgaaaaccgggtgaagtgacaataacatgccgtcagcatattctgaagtgacgaaagtccaaaacgcagaactctccggctgaaatcgcttaaaacatttgctgatttaggcagaagaggatgcagacgtacgcatctacgcatactatagcatcgaagtccaagagagtgtatctcagacgtacaggtgaatatagtcaacttgactgaagcaaagtccccctctttgcttcagtttttttgttttttcaatagatggaaaacctgttgatcttttcaacatttgtatattaaaatgaaatataacgcttacaatgatgggacggggggcacgaacgtgagtgtggcattgatgaaaatgtggtttgcgcttggtgctatgggattaatgtttgttgcggtcgcctttatttatgtcagcaggtacaaagtgaaaaacaaactgataaaagcagcggtttcttcactcgcttatgcctgcatggtcatctcgggattgatcgtgttaatggtcgttttcagcgggcctgtcaatgaataaagccaaaagggggcgcggaatgcataagttaaaaatggccgtcataacggcaatggcggtgcttctgctgtcgggctgtctgtaccctgaagcaaaaaaaactgaaaataaagtatcttacaaacatcagcttcagcaggtgcaagcggcagtggatgaatttaaaaaggcgaacggcggacttctgccgattcagacaaaagatatgaaaacaccgctctatcaaaaatatccgatagattttaagcggctcgcgcccagatacatagaggagccgccggcctcagcttatgaaagcggaggaatgtaccaatacgtgcttgtcgatgtggaaaataagcctaccgtcaagctggtcgatctccaaatggcggaagcaatccgcgacatgaagctgcgtgtcaaaatgtatcaggaaaagcatacatatcctccctatgaggacgctgtttcaaaaggcctgttcactttaaataaaaaaaagctcggcatgaaagactctccttcagtcaaaagtccggtttcaggcacgtctctgccgcttttaatcggcgctgacggagaaatctatgccgactatcgcgtcgatctcgcccgctgcctgaaggaaaacaaaaagaaaatcaaaccgggcgcggaaattcaggatattttatggaaagagactcctttcgtcccggccttttcagtcacttacaccgtaaatgaaaaacaggaacccgtttttttagaaagtcaaacgaaacaggaatgaacctttttcccgcgcatacaaatagggagaaaggtttttttgattttgatagaaaagactgcctgaaaattttctaaagatgtcatattgaaataggacaacgtcatacacatatagtgtcctgtatttgattggagaatggtgaatgaaaaatgataaggataggaagtccgggaggggatcacttggaaaaggtcgatattttcaaggatatcgctgaacgaacaggaggcgatatatacttaggagtcgttggcgctgtccgtacagggaaatctacattcattaaaaaatttatggagcttgtggtgctcccgaatatcagcaatgaggccgaccgagcgcgggcgcaggatgagcttccgcaaagcgcagcaggaaaaacgataatgaccacagaaccaaaatttgtcccgaatcaagccatgtccgttcatgtcgcggaaggacttgatgtcaacatccgtcttgtggattgtgtgggatatacggttcccggggcgaagggatatgaggatgaaaacggtccgagaatgatcaatacaccttggtatgaagaaccgattccctttcatgaggctgcggaaatcggtacgagaaaagtcatccaggaacactccacaatcggggtcgtcattacgacagacggctcaatcggcgatattgcgcggggcgattacgtggaagcggaagaaagagtcatcgacgagctgaaggaagtcggcaaaccgtttattatggtcatcaactcggtaaaaccgtaccacccggaaacagaagcgctcagagctgaattaagcgcgaaatatgatattcccgtcctcgccatgagtgttgaaagcatgcgggaaacagatgtgttaagcgtcctcagagaagcgctttacgagttccctgtgctggaagtcaatgtcaaccttccgagctgggtcatggtgctgaaagaaaatcattggctcagagagagctaccaggaatcagtgaaagaaaccgtaaaagatattaaacgcctgcgcgatgtcgaccgggttgtcggccacttcagtgaatttgagtttattgaaagcgccggattggccggaatcgaacttggccagggtgtcgcagaaattgatttgtatgcgccggatcatttatatgaccagattttaaaagaagtggtcggcgttgaaatccgcgggaaagaccacctgcttgaattaatgcaggacttcgcccacgcgaaaaaagaatatgatcaggtatcagatgcgctgaaaatggtgaaacagaccggctacggcattgccgccccggccttaaccgatatgagccttgatgaaccggaaatcatcaggcagggatcaaggttcggagtaaggctgaaagcggtcgctccgtccattcatatgatcaaagtggatgtggaaagtgaattcgcaccgatcatcgggacagaaaaacaaagtgaagagcttgtccgctacttaatgcaggactttgaagatgatccgctttctatctggaattccgatattttcggcagatcattgagctctatcgtaagagaaggaatctccgcaaaactgtcactcatgccggaaaatgcgagatacaaactgaaagaaacgctggagagaattattaacgaaggctcaggcggcctgatcgccattattttgtaagctgaaggacctcttcctgaaacggggggtctttttttattctttttagatactggaaatcaatcaaggattaggaggaaaaaagcaaaaaaaggaatatttgttcggtaaaacacgtgaaaaccttgacgagcaagggattgaggctttaaaatgcttgatatggctttttatatgtgttactctacatacagaaaatcttcactttgttggacaaacattcctcaaagtgtctgttttcttatgaaaagccgtttacttgtctgttcttccctgctttgattttttatcagacaggtttagaatcaggctgaactgtgaagaaatgataataaactgctgatttgatacccttttgggaggaggtgaaaggcatgaacaagacagaactaatcaatgcggttgctgaagcaagcgaattgtctaaaaaagacgctacaaaagcagttgattctgtttttgatacgattttagatgcacttaaaaacggtgataaaatccaactgatcggtttcggtaactttgaggtgcgcgagcgttctgcacgtaaaggacgtaacccgcaaacgggtgaagaaatcgaaatccctgcaagcaaggtacctgctttcaaaccaggtaaagctcttaaagacgctgttgcaggaaaataattgtgaatatagatcgtgtatgcatctgatacatacactttgtttcttcacagaaaagccccttgataaaggggcttttcatatttaagcagccccggtcaccgggcaggactttcgttttgcttttggcgcggcaaatgtgctagaatcgaaattaaatgtattcaatggtggaggacacagacaatgaaagaagttaataaagaacagattgaacaggcggttcgccagattttagaggcgattggagaagatccggaccgggaagggcttttagatacgccgaaacgcgtggcaaaaatgtacgcggaagtattctcgggattaaatgaagacccgaaagaacactttaaaaccgttttcggagaagagcatgaggagcttgttcttgtaaaagatatcgcgtttcattccatgtgtgaacatcaccttgttcctttttacggaaaagcgcatattgcctacattccgcgcggcggcaaagtgacgggcctgagtaaattggcgcgggcggtggaagccgtctcaaaacgcccgcagctgcaggagcgcattacttcaacgattgcagaaagcatcgtagagaccttagatccccacggcgtcatggttgtcgtcgaagctgagcatatgtgcatgacgatgaggggcgtaagaaagcctggcgcaaaaacagtgacttccgctgtaagaggtatttttaaagatgacgcagcggcgcgttccgaagtgttagaacatattaaacgtgcggattaataatgatagagggtgcagatatgaattcaaagcattcaagtgattttgtcgtcattaaagcggtcgaggacggcgtgaacgtcatcggtttaacgagaggtacggatacgaaatttcaccattccgaaaaactggacaaaggcgaagtgattatcgctcagtttactgagcatacctctgccatcaaagtgagaggcaacgccctcatccagaccgcttacggagaaatgaacagcgaaaaaaaataagccggctgtttcccgcttttgccaattgcccgcaaacggcgggagaatacagccaatttcttttttttatgctataatgatacctgcgtataataatgacgagtaaatctcatacatattagaataaatgtgaatttggggacaagggtgatatttttgcaagacatctacggaactttaacgaatctaaatacgaaattaaaacaaaagctgtctcatccttatttagcgaaacatatttccgcgcctaaaatcgatgaggataagcttcttctttttcacgctttgtttgaagaggcggacattaagaacaacgacagagaaaattacatagtaactgcgatgcttgtccaaagcgcccttgatacccacgatgaagtgacaacagccagagcgttaaagcgagacgaaaataaaaaccggcagctcaccgtgcttgccggcgactatttcagcggactgtattattcgcttttatctgaaatgaaggatatctatatgattcggacgctcgctacggcaattaaagaaatcaatgagcataaaatccgtctgtacgatcggtctgtcaatgacttgaatcaattgatcgaaagcatggcgattgtggaagcggccctgtttcacagagtgtcagaccactttaatcttccgcgctggaaagagctggcgagtgatttttttgtatataagcggctgatgaacggcaatgctatatttctcgatgtcatcggcaatattgtaaagtcagggaaatcaaaggctgacataatggaagatagcttccgaaaggcaaagcaaagcattgaaacgctgctgccgctcaattcaccaatccaaaacctcatgctgaaccggctcaaagcgatcagccaggacaaaacatatcatcagaaagtggaagaagggtaatcaacatgcaggagtcaaaagaacagcgcgtacacggcgtgtttgaaaaaatctataaaaattatgaccaaatgaactctgttatcagttttcagcagcataaaaaatggcgcgataaaacgatgcagatcatgaatgtaaaagaaggcgcaaaagcgcttgatgtctgctgcggaacggctgactggacgattgccctcgcagaagcagccggaaaaagcggcgaaatcaaaggactggatttcagcaaaaatatgctgagcatcggcgagaaaaaagtgaaagagggcggttacagccaaattgagcttttgcacggaaatgcgatggagcttcccttcgctgatgattcttttgattttgtcaccatcggcttcgggctgcggaacgttcccgactatctgaccgtgctgaaagaaatgcggcgggtcgtcaaaccgggcgggcaggttgtatgtctggaaacatcccagccggaaatgttcggattcagacaggcatattttctatattttaaatacatcatgcctttcttcggaaaaatgtttgcgaagagctataaagaatattcttggcttcaagaatcggcaagagaatttcccggtatgaaagagcttgcgcgtctgtttgaagaagcgggcctgacgaatgtcaaataccattcgtttaccggcggagtggccgctacgcatatcggttggaaatgatgaatatacagatgtttgggtgaatgatatgaaatttaaaatggcctattcttttttaaatgacgatattgatgtgatcgaaagggaacttgagcaaacggtgcggtcagactatcccttgctgagtgaagccgggctccatctgctccaggcgggaggcaagcggatccgccctgttttcgtattgctttccggcatgttcggcgactatgacattaataaaataaaatatgttgcggtgacgctggaaatgattcatatggcgtccctcgtgcatgacgacgtcattgatgacgccgagctgcggaggggaaaaccgaccatcaaagccaagtgggacaaccgtatcgccatgtataccggtgattatatgcttgcgggctcacttgagatgatgacgagattggatgagccgaaagcccaccggatcctgtccaaaaccatcgtagaagtatgcctcggagaaattgaacagatcagagataaatacaatatggaacaaaacctcagaacctatttgcgccgcatcaaacggaaaacggctcttctcattgccgtcagctgccagctcggcgccatcgcttcgggagctgatgagaagattcacaaagcattatattggttcggctattacgtgggcatgtcctaccagattattgacgacattcttgatttcacttcaacggaagaggaactgggaaagccggtcggaggggatctgctgcaaggaaatgtcactctgcccgttttgtacgcgctccgtcagcctgaattgaaaaatcagctgaaattaattaacagtgaaacaacacaggagcagctcgcccccattattgaaaatattaaacgcacagacgcaattgaaaaatcaatggccgtcagtgacaggtacttaaaaaaagcgtttgaaaaactgaatacactgccgagaggacgggcgcgctcatcattggccgccatcgccaaatatatcggcaaacggaaattttaaattccttttacgaacaagatgtgaacattctccgccctggattgattaattgtcagaaagatgttacgatttcggtgtgcaacttgaaagcctatacataatgatggggtggagaatcttatggaaaaaacttttatcatggtaaaaccggacggcgtacagcgccagctgatcggagagattttatccagatttgagcgtaagggcttacaattggcaggagccaagctaatgcaagtttcagaacagatggctgaaaaccattatgctgaacataaagggaagccgtttttcggcgagcttgtggaattcattacatcaggacccgtatttgcaatggtatgggaaggggaaaatgtagtagagatcacaagacagctgatcggaaaaacgaacccgaaagatgcactgccgggcacgatccgcggtgactacggcatgtttgtcggcaaaaatatcattcacggttcagactccttagaaagcgccgagcgggaaattgacattttcttcaaacgggaagagcttgtaccgtatcaaaaattaatggccgactgggtgtactaagccgtcagcctttctttttctcttgttatgaaaaggtttacatattttaagaaagacagaggctgcgctgccctgtcttttcatttctcacaaatcagcctgcgggctgatttttttattgaaatcgtacaaattagaaagaaaacaggctatactaggacaaaagacagcgagattgggagagaagcaatggagccttacgaaatttttatcaccaagtggaaacaaataaccggcgttgatttatctttatacaaagaagcacagatgaaaaggcggctgacgtccctttatgaaaaaaagggattcaaagattttcaggaatttgccgccgctttggagaaagacaagcttttattaaatgaaacattggacaggatgacgatcaatgtttctgaattttaccgaaattataaacggtgggaagttcttgaaacctcaattcttccgttaataaagcataacaaaccgttaaaaatatggagtgcggcctgttcaacgggggaggaaccctatactttggctatgattctcagtcagcaggcgggtttggccggatttgatatattggcgacagatattgatgaaaaggcgcttggcaaagccaagcggggcatctatcaggaacgctcgctgcaagaggtgccggcttccgtgaaaagccgttatttcaccaagcaggctgacaacagttatcaagtaaaacaagagattcaaaaaaacatccggtttaagcggcacaatctgctcgccgacagctatgaacaggattttgatctgatcgtctgccgcaacgtctttatttattttactgaaaaagcaaaagaagagctgtatgtaaaaatggcgggcagcctgaaaaagaacggaattctgtttgtcggaagcacagagcagattttcagcccggaaaaattcggccttgagagcactgatacatttttttatcaaaaaagatagaagacatttaatgaaaacttgtggtatagttttacttaaaagcgttaatgcgatgaagggagaagaaagaaatgagatacttaacagccggagaatcacacggcccgcagctgacgacaattatagaaggtgtgcctgcggggctttatataactgaagaagacattaattttgagcttgccagacgtcaaaaagggcacggccgcggacgccgcatgcagattgaaacggacagggcgaagatcacaagcggcgtgcggcatgcccggacactcggttcacccatcgcgctcgttgtagagaataaagattggactcactggacaaaaatcatgggcgccgcaccgattacagaagaagaagaaagtgaaatgaaacgtcagatttcaagaccgagaccgggacacgcagatttgaacggggctattaagtataatcaccgtgatatgagaaatgtgttagaacgatcttccgcgcgtgagacaacggttcgcgtggctgccggagccgtcgctaaaaagattttagcggagcttggcattaaagtcgccggacacgtcctgcaaattggcagcgtaaaagcagagaaaaccgattacacatccattgaggatctcaaacgggtaacggaagaatcaccggtgagatgctacgatgaagaagcaggccgtcaaatgatggcagccattgatgaagcgaaggcaaacggcgactcgatcggcggaatcgttgaagtgatcgtcgaaggtatgcctgtcggtgtcggaagttatgtccactatgaccgtaagctggacagcaagctcgctgcagccgttctgtcgattaacgcgtttaaaggcgtagagttcggcatcggttttgaagcggccggcaaaaacggcagtgaagttcatgatgaaatcgtatgggatgaagagaaaggctatacacgcgccacaaacaggctcggaggattagaaggcggtatgacgacgggaatgccgattgtcgtccgcggcgtcatgaaaccgatccctactttgtataagccgctgaaaagcgtcgacattgaaactaaagaaccatttacagcgagcattgaacgttcagacagctgcgcggttccggcagcaagtgtagtggctgaagctgcagtggcctgggaaatcgcaaatgccgtcgtagaacaattcgggcttgaccagatcgaccgcattaaagaaaatgttgaaaacatgaaaaaactatcgagggaattctgatgaaagagcttgaggttcggacagcttcctccgcatatcccgtgtatatcggtgaaggcataaggaaacaggccgctgctcttttgtcttcactgaacaggccgctgacaaagatccttctcgtcatcgatgctgaagttgaccggctttacggcgatgagatgttccggcttttaaacgaaacatggcccgtgaaaaaagtaatcgttccaagcggagaagaagcgaagtctctaaaagagtatgaacggattcaaacggaagcgatcgctttccatatggaccgctcctcatgtatgatcgccttcggaggcggcgtgacgggtgatttgaccggcttttgcgcagcgacttttatgcgaggaattgatttcattcaaatgccgacgacactgcttgcccatgacagcgcggtcggcggcaaggtggccgtcaaccataaactcggaaagaacttaatcggcgcgttttatcagccgaaagcggtgatttacgatacggagcttctgaaaaccctgccggaacaagagctgagatcgggcatggctgaagtgatcaaacacgcgtttatcgccgatcatgcttttttagaaaaacttctcacgtttgacacgttgcaaggactgacaagcgctgagctgaatgaaatgatttataaaggaatttcaatcaaatcggccgtcgtgcgtgaggacgaaaaggaagagggcataagagcttttctgaatttcggccatacgctcggccatgccgttgaggcggaatacggctacggccggattactcatggagatgcggtcgccctcggcatgcagtttgccctttacgtgagtgaacaggttgcgggttgcaagatgaacaggaaagaactcacacaatggctgattgggctcggctacccgggaagtatcagacaagatattgaaacgccggttctctccgcccggatgatgaatgataaaaaaacgcgcggaggcatgacacagttcatcgtgttaaaggaattaggggaagcgcgggactgcatgctttcaaaagatgagctcgaaaatttgctgaacaaatggcgaatggaggaaacagcatgatgatacgcggcattcgcggagcaacaacggtggaacaagacaccgaacaagaaattttagaaaaaacacagcagctgcttgaaaaaatcattgaacaaaatggatgcaagccggaagacgttgtacagatcctgttatccgccacgcctgatatccattccgtatttccggcaaaagcggtccgccgcctttccgggtggcagtacgtcccggtgacgtgcatgcaggaaatggatgtcaccggcgctctgcaaaagtgtatccgtgtcctgatgacggttcagacggatacgcctcaggatgaaatcaagcatgtctatttagaaaaagccgttgtgttaaggccggatttatcattgacaaaaaatactgacatgtaatacgataaacaaagcttagaaatacacaagagtgtgtatagagctggtaagtaagatattgaacagttgagtttagaatagggtagcagagaatgagtttagctgagctgagataaacacgtttttattctgcccaaaagaagcctttcttttgggtttatttcttatacgcaagactcctctcactcttcatctcattctccttaccgtaaggaggagaatcatgaatttacaatcggatgtttctttatttttaaaggacagtctgacacaccgcaccattccaatcgcagagacttttacggtcgacacgatcacacccattcagatggttgaaaaactggacagaaacattacgtatcttttagaaagcaaggatgagtcgtcaagctggtcgagatactcttttatcggcctcgatccttttatcacgattaaagagagtcatcacacattcactgccgctgatccaaacgggcatacgctgtttgaagccggagaattaaaagccgtgcttgattggatgaatgaaagcttccgcattaaaacacccgagcttgatatcccgttttcgggaggggccgtcggttatctgagctatgacatgatccctttgattgagcctaccgtgccgagccacgcgaaagaaacagatttcgaaaaatgcatgctgtttgtctgccggaaaatcatcgcgtacgaccacgaaacgaaacaagtgcatttcattcaatatgcggcgcttaacggccgggagacggaggaagaaaagcgggccgtttttaaagaaaattgcgcggagcttcgtaagcttatcggtattttgacagaaccgaaagatatgaaagagccgtttttttctaaagaaacatttgaaacgccaagttttgccgatatgacatctaattatacgaaagaagagtttatggccggcgtcaataaactgaaagaatatataaaagccggagacatttttcaaggggtgctttcgcaaaagtttgacattccggtatccagacattcatttgagctgtacagggtgctccgcatcgtcaatccttcaccttatatgtactatatcaaactgcctgacagagacattgtcggaagttcgcctgaacgtctgatccgcgtggatgacagacacctggaaattcatccgattgccggaacgagaagaaggggcgccggaaaagaagaggacgatcgcctcaaaaaagagctgatgaatgacgaaaaagagaaagctgaacattatatgctcgtcgatcttgcgcgcaatgacatcggcagagttgcggagtacggttccgtagccgttccggaattcacaaaggtcgtttctttttcacatgtgatgcacatcatctctgttgtaaccggccgtttaaaacagggcgtccatccggttgatgcgctgatgtcggcattcccggcaggaacactctcgggcgctccgaaaatccgcgcgatgcagcttttaaatgaattagaaccgacttccagagaaacctacggcggatgtatcgcttatatcggatttgacgggtcaattgattcgtgtatcaccatccgcaccatgagtgtcaaaaacggtacggcgtcggtgcaggcgggcgcgggaatagtcgctgattccgtcccggaagccgaatatgaagagagctgtaacaaagcgggggcgcttttaaaaacgattcaaatcgcagaagacatcttttctggcagggaggagaagacggatgaacaaatttctgcaatcgtgcgttaatggccgcacgctgaaaaccggagaagccgaaaagctgatggagatgatgatgaacggggccatgtcgcagtctgagatcggggggattttatcggtattagcccaccggggtgaaacggcggaggagcttgccggatttgtaaaagtgatgcgggcgcgggcacagacggcgggtggcttggcggatgtcgttgatacgtgcggaacaggcggagacgggatttctacgtttaacatatccacggcagcggcgattacagcttctgccgccggagctaaagttgccaagcacggaaatcgctccgtttcgtctaaaagcggcagcgcggatgtgctggaaaagctgggggtttccattcaagccactccagaaagcgtcaaacgcagcattgaaatgaaacaaatggggtttttgtttgcgccgctgtttcattcgtcaatgaagcacgtcgccgccgcaagaaaagagcttggcttccgaaccgtatttaatctgctgggcccgctcagcaacccgctgcaggtgaagcggcaggtgatcggcgtctattcatttgataaagcgcgcctgatggcaagcgctttggaacaatttgatgtcagacacgtcatgcttgtgtcggcgcgtgacggattagatgaactgtccatcacagcaccgacagatatcattgagctgaaaaacggtgaacgtctggaatattccgtttcacctgaacaattcggttttgcagaaggttcattgaaggatattcaagtgagttcatcggaagaaagcgcgcttctcattcagaatatttttgcaaatagagctccgtcatccgctctgcatattaccgccttaaatgcgggcgcggccatttatacggcaggtcttgcaaacgatctgaaagaaggaacgaaaacagccttagaagccattcaaaacggagatgccaaaaggcagctcgaacgtctgaaacagaaagaggaagaaatgtatgcttgatcaaatcattctgcagaaaaaagaagaaatcaaatccatcgtgctgccggaaacctgtcaaattgaacggagatcctttaaagaagcgctcctgaacccgaaccgttttatcgggctgattgccgaagtgaaaaaagcttcgccgtctaaaggattgattaaagagcattttgttccggaaacgattgcggcggattatgaagcggctaaagccgacgccctttcggttctcacggatacccgtttttttcaggggagaaatcaatttctgacagatgttaaacaaaccgtgtctcttcccgtgctgagaaaagattttattattgattcccttcaggtggaggaatcgttcaggatcggcgccgatgccattttgctgatcggggaagcgctggaacctccaaagcttcatgagctttatctggaagcccgcgggaagggcatggacgttctcgttgaagtccatgatgaaactgtgcttgaacggattttacaagtgtttcagccggacattctcggcataaacaaccgggacttaaaaacgttccgtacttctgtttcgcaaacggaaaaaatagcgcagcttgtgccggacggctgcctgctggtcagcgaaagcggcatcggttctttggctgacctgcaattcgtcaacaagcacggggcgcaggctgtattggtcggagaatccttaatgagagaggattcgcagcaaaaggcgatccgcggactgttcggagagtgacgatatgaaaaagcctgagttaaagtactgcggaatacgatcgaagcgtgattatgaacttgcggcagcttcagaagcggattatctgggatttatttttgccgcaagcaaacggagagtaacgccggatgaggtccggaaatggaaagagcaggtccggacagacaagaaacatgtcggagtatttgtaaatgaaacgatagaaaacatcgcgcaaatcgcatctgatctggcacttgacgtcatccagcttcacggtgatgaatcgcctgaggatgcccttcgcctccgtccgcttgtgcgctcggaaatatggaaagcgctccatcacggggaagggacgctccgtcagatggctcaatttacacctgctgtcgacggctatgtcattgattcttcagtgacaggaatgagaggcgggacgggaatcgcgttttcatgggcccgtgtccccttgtaccgaaagcaggctcaaaatgcaagcaagcgctgttttattgcgggcggtgttaatcctgaaacgattaccggcttactgagaacgcgtccgtgcggtatagatcttgccagcggaattgaaaaaaacggacacaaggatcaaacactgatccggcttttagaagaaaggatgaaccactatgtatccatatccaaatgaaatcggaagatacggcgaattcggcggcaaatttgtccctgaaacattgatgcggccccttgaggaaatcgaaacggctttcacagaattaaaaaatgatcctgtttttcatgccgaatataaaaaactattgtttgattactccggaagaccgactgcattaacgttcgcagacagggtgtcagagtatttgggaggggcgaaaatctatctgaaaagagaagatttaaaccataccggctctcataaaattaacaacgcgttaggccagattctgcttgctaaaaagatgggcaaaacgaaaatcatcgccgaaaccggtgcgggacagcacggtgtggctgccgcgacagccgccgcaaaattcggttttaaatgtacggtttttatgggtgaagaagacgttgcgcgccagtcgctgaacgtattccggatgaaactgctcggcgcggaagtggtgccggtcacaagcggcaacggcacgctgaaagatgcgacgaatgaggcaatcaggtattgggtccagcattgtgaagatcatttctatcttatcggttctgtagtgggtccgcacccatatccgtatatcgttcgcgaatttcagaaaatcatcggcgaggaagcgaaagaacagctccgccgggttgaaggaacgctcccggacaaggttgttgcatgtgtcggcggcggaagcaatgcgatgggcatatttcaggcctttttagacgaagacattgagctgatcggcgccgaggcggccggaaaagggattgatacgccgctgcatgcggcaacgatcgcaaaagggacgctcggggtgattcacggatcaatgacctatttaatacaagatgaatacgggcagattatcgaaccgtattccatttcagcaggccttgattacccggggatcggccctgagcacgcctatctgcacaaaagcggccgtgtaacgtacgaaagcgtgacagacgatgaagcgattgccgcgttacgtctgctttctgaaacagaaggtattcttccggctattgaatctgcccacgccctggcaaaagcgtttgaaatggcaaaggacatggataaagacaaaatcattctcgtcagtttgtcgggaagaggagataaagatgttcatacgctgatgaatgttttggaaaacggggtggagacacatgtttaatctgcgagattctgaaaaattgtttatcccttttatcacagcgggcgatccgcttcctgacatttctgttgaactggcaatatcattacagaatgcaggcgcttctgcccttgaaatcggcgttccttacacagatccgcttgcggacggacccgtcatacaacgggcttcaaaacgggctctggaaaacggaatgaatatcgtaaaagccattgaacttggcggcaaaatgaaaaaaaacggcgttcatattccaattatcctctttacgtattataatcctgtgttacaattagaaaaagaatactttttcgctttactgcgggaaaacgacatagacggcctgcttgtacccgaccttccattagaggaaagcgcccttttgcaaatgacatgcaaaaaggagaacatcgcttatatctcgctggttgcgccgacaagtgaagaccgtttgaaaataattactgaacaggcctgcggctttgtgtattgtgtatcctctttaggagtgacgggcgtacgcagcgaattcgatccgtctgtatactctttcatccgtaaggtgaaagaattcagctctgttccggtggcggtcggttttggcatttcaaaccgcaaacaggttgacgggatgaatgaaatatctgacggtgtcgttgtcggcagcgcgcttgtcaaaaaagttgaagagcttaaaacaaagcttgtgaatcccggcacaagagctgatgcgcttcttgaatttgaagaatacgcgaagacgttcggacgactgtacagtgtaaaatgaggtgactggatttgcagattaaagaacagctgcggcagctgaaaccgtatcagccgggcaaaccaatagaagaagtgaaaatggaatacgggcttgaaaaagtagtaaaactcgcttctaacgaaaatccgttcggctgttcacaggccgcaaaagatgcgctgcatcaggagattgagcagcttgcgctgtatcccgacggttacagtgccgctttgagaacgcggctcagtgagcatctgcaggtcagtgaatcttcgatcattttcggcaacggctctgatgagctagtgcagattatctgccgttctttattaaatgatcaggcaaacacgattaccgccgccccgactttcccgcaatacagacacaatgcggtgattgaaggcgctgaggtgcgcgaggtgccgctccgcagtgacggcgctcatgatttagaccggatgctggaagcaattgacggcgagacgaaagtcatatgggtatgcaaccccaataatccgacggggacatatacttctgagcaagagttaattgcctttttaaacagagttcccgagcatatactcgttgtacttgatgaagcgtactacgagtatgttacggcggacgattaccctgaaagcatcccgcttttaaagcaatatccgaatgtcatgatcctccgcaccttctctaaagcgtacggacttgccgcgctgcgtgtcggatacggcattgcggacgaagcgctgatccgccagattgaaccggcgagagagccgttcaatacgagcagaatcggtcaggcttcggcactggcagcgcttgacgaccacacatttattcaggaatgcgtcgagaaaaataaagcgggccttaagcagtattatgattttgcggaaactcacggattaacttgttatccttcacaaaccaactttgtgctcattgattttaaccgtccggcggatgaactgttccaagccctgttggaaaaaggatatatcgtccgttcaggacaggcgctcggatttccgacagcgttaaggattacggtcggtacgaaagagcagaatgaggaaattctcacaatcttagctgaaatattataagaggtgatcaagcatcacctctttgctctattaaaatagttgaaaaaggaaatgagtgaaatgaaggatactatattgcttgcggggatcgggctgatcggcggatcgatcgcattggccatcaaaaaggagcatccgcataaacggattatcggtgtggatatttcggaagaacagctcactgccgcgctgaagctcggaattattgacgagcgggccggctcattgacggaaggggcgcagcaagcgtctgttgtcattatcgccacgcctgtcgcccaaacgctgaaaatgctcgatatgctggccgcatcagacatcacccatgaactcctgattacggatgtgggcagcacgaaacagaaagtcgtcagctacgccgacaaagtgcttccggctcattatcaatttgtcggcggccatccgatggcggggtctcataaatccggggccgctgccgccaaagaatttttattcgaaaatgcgttttacattttaacacccggaaaatcaacttctaaagagtcagtaacgcatctgaaggagcttttgaaagcggcaaacgcccactttgtggagatgactcccgaggagcatgacggcgtaacgagcgtcatcagccatttccctcatatcgttgctgcaagcctcgtccatcaggctcatcattctgaagaaaattatccgtttttgaagcgtttcgcagccggcggttttcgggacatcaccagaatcgcctcaagcagtccggcgatgtggagagacatacttcttcataacaaagataaactgcttgaccgcttcaaagaatggaaacgggagattgacacgatcgaatcttatgtagaaaatgaagatgcggacagcctgttcggatattttaaaaaagcgaaagattatcgcgacggcctgccgctccgtcaaaaaggagcgatcccgtccttttatgacctttatgtcgatgttcccgatcatccgggggtcatttcggaaattacggcgatactggcagaagaaaaaatcagtatcaccaacatccgcattatcgaaacaagagaagatattaacggaattctcagaatcagtttccagactgatgatgaccggaagcgcgcggaaacctgcattcaatcccgcgccaaatatgacacattttacgctgactgaggtggaaaacattgaaaagagaaaaagtgacgtctttaaacggtgaaattcatattccgggggataaatccatctcccaccgttctgttatgttcggagcgcttgcggaaggaacgacaacggtaaaaaactttttgcccggagccgattgtctgagcaccattgcctgcttcagaaaaatgggtgtctccattgaacaaaacggaagtgatgtaacgatatacggaaagggcattgacgcactttgtgagcctgacagccttcttgatgtcggaaattccggcacgaccatccgcctgatgctcggcattttagccggacgcccatttcacagtacggtagcgggtgacgaaagtattgcaaagcgcccgatgaagagggtgacggagcctttaaaacagatgggagccgcgattgacggaagagcggacggagggtttacgcctttatccgtaagaggcggacaattgaaaggcatagattacgtctcccctgttgcaagcgcgcagatcaaatctgccgtgctgcttgccggattgcaggctgaagggacgacgaccgtcactgagcctcataaatcaagagaccatacggaacggatgctgaacgcttttggcgccgagcttgcggaaacggagacgagcgcttccgtaacgggcggtcagaagcttcggggagccgatattttcgtgcccggcgatatttcttcagcggcctttttcctcgcggcaggcgctgtcgttcccggaagccggattgtgctgaaaaacgtcggcctgaacccgacacgcacgggaatgattgatgtcttaaagcaaatgggggcttcacttgaagtgattccttcagaagcggacagtgcggagccttacggagacctggttattgaaacctcagctctgaaagcggcagaaatcggcggagaaatcattccccgtttaattgacgagatcccgattatcgcccttttggcaacgcaggctgaaggcacaactgtcattaaagacgctgcggagctgaaggtgaaggaaacgaaccggatcgacaccgtcgtatcagagctccggaaaatcggcgcagacattgaaccgactgaagacggcatgaaaatacacggcaaaaaaacgcttgcgggcggagccgatgtgtcaagccacggcgaccaccgcatcggcatgatgctcggtatcgcttcatgcctgacagaagagccgatcgacatccgtgatacagaggcgatccatgtctcatatccgacattctttgagcatttagatcaattagccaaaaaagcctgaagacgattcttcgggcttttttcttcatgtgtcataaaatcttgggctttgacatagcttgtcttaaacagaaaactaaaagaaagggggaatgcgttttcgttacagaaacagccggaacaaattgcgctgtttgcgtataaagatgccgtccccttttttgccgttttcctcttaaccattttctgataaactataatgccgggtgaagcatcttatttgcgggcaggccctgtctgaattatgataagaataacccgaataaaaacccttttcatttggttgatgaggtataggaaaagaaaggaccggtctgatttgaatacattgattcaagaagccataaaattagttgaagcaggtgaaaccgaaaagggactcaaagcgctttcaaaagctgaaacagagcttcatgacgaagacaaagccattgcagcccagctctactatgaatggggaaacgccgaaaaagcgttagcgctgatcagtgatctgcatgacctctatccgggtgagtctgagctgacgaatttttacgccgaattgttaatagatattgatgaagaagaaaaagctcttgaggtgctggagacgatttctccggaagacccgtcttacgcggaaagcctccttttaatggctgatctgtatcagatgcagggcttatttgaagtaagtgagcaaaagctgttacaggcgaaagcgatgttacaagatgaacctgttattgatttcgctctgggggaattatacttcactcagggatcatatgcaaaagccgttccttactatgaagagacggcaaaagaacggcacgaaatcggcggcgtaaacgttcatcagaggctggctgagtcattgagcgcggcgggtgaatttgaggaagcgatttcatggtatgaaaaagcggcggcagaacatacagaaccgaatacgattttcgggtacgggttcacagcctatcaggcgggaatggtcaaaacagccatcaagcagctgtctgatttaaaagggcttgatccttcctattcatcgctttatatgccgcttgcaaaaagctacgaggcagaaggcatgtatgaagatgcattaaaaaccgctaaagaaggtattacttacgatgaatacaataaagagctttttctctatgcggcgaaaatggcgttaaagctcggcagcgaagaggaaggcaaaaagcttcttcaggaagcgctggcgctcgatccgggttacgtggaagcgctccatacgcttttagccgtctatcataaagaagaaagctttgaagagattattgatctgattcaggaagtccgcggctacggagaagaagatccgaaatacaattggtatttggcgggggcctatacaggcctggagcaatacgctgaagcgaaaaaaagcttcgaagctgcgtatctccattatcaggatgatcgggatttcttatatgaatacgctcacttcttattggaagagggtctccagaaagaagcgctgccgcttttaaaacaagtgctttcaatggatggaacaaacgaagagcttgaagaaacaatcttacggatagaggatgaatttttaagataagcaggattttggaccatgcttgctgaatgtataagtgatgtcagattatacgatcgatagaggagggaattacatgcagacccctgtttctgtcaatgaaaaaaaggattttatccgttggtttttaaatcattatcagcttaaacgccgggagtgcgtctggattttaaattatttaatgagtcatgattcattaatggaaaaagtccattttgtagaacaagccgaattttgcccgagaggcattatcatgtctactcattgcgttgatgaggtgccgtttaggttttacaaagaaaatgtcatgactacggacgcggaaaaatcttttcacgacatccggttaaataaacagcaggatttatttatccagctgaatttccgttcggcctacagctcaccggaatatgccgctgttcttgaatcaaatccgcatctgccgaaagacctgtttgaaaataaacaggatcaggggatggctgaaaaaatattagaacatgccatttccactttccagcgggaaaagctgcttaaagatatcgacgaggcgctggaccgccacgacaaagaaacatttgaaaagctttcccgccaattgaatcagctcacataaatgacagccttgcagaatatgcaaggcttgttgcgtaaagaggaggaacgagacatgagatggagggccgctgatgccgatgcctatttacaatctgcggattacattgataccgctgtcattccgttaatttccataacgtcttcaggaggcttaaaagaggccgttgaacagggggaaagcacccaattgctttctgaagagcttgagcgccaattgaagggacgggtatatttattcccctcttatacatatgttgatatagaccaatcacaaatcgccctgcttcaaaaactcaaagaagaggtgatgaccaacttcaggcacgccttgttcctgacggcagacgaaaaatggaaggattctgaaatagggtctgatgtcatatacatacctgccgttccgtttgaacatatgaaagactctttaaagagaaaaattgcggatgacaagtgcggagaaattttgaacgttttgttacagaagtggaacaattcttaaaaactccaggcatcctgcaaaacacccgttttgcctctgttgaccttgctgaaagattcatatattatgagggtgtcaaatctcagaattattttctattttagttaatttttggtcaatctttagggggggaagagatgggcggaaaacaagatatatcaagaagacaatttttaaactatgcgctcaccggcgtggggggatttatggccgccagtgcgcttatgcctatggtccgttttgcgctggatccggtattaaaaccgacgggagatcaaaaaatggtgcaggttgtcagtgtggatgagctgacgaaggagccgaagcggtttgactttaaaattcatcaagtcgacgcctggtacgaatcggaagaatccaggtcagcctgggtttacaagcatggggatgaaattatagcgctttctccgatctgcaagcatttgggctgcaccgtaaactggaacaatgatcctaaaaatccgaacaaattcttttgtccctgccattacgggctgtatgaaaaagacggcacgaacgttccgggcacgccgccgctcgcgcctcttgaccgttatgagcaaaaagtaaaggacggctttttgtatcttggaaaagcaaagcctaggggggaagggtgacatgctgaataaaatttatgactgggtggatgaacgtctcgatattacgccgatgtggcgggatatcgccgaccatgaagtgccggaacatgtaaatcccgctcaccatttctcggcttttgtctattgtttcggcggtttgacgttttttgtaaccgttatccaagtgctctccgggatgtttttaacgatgtattatgtgccggatataaaaaacgcgtgggaatctgtgtattatttgcagaatgaagtcgctttcgggcagattgtaaggggtatgcaccattggggcgcaagtttagtcatcgtgatgatgtttttacatacgctgcgggttttctttcagggagcttataaaaagcctcgggaattgaactggatcgtcggtgttctgatcttttttgtgatgctcggtctcggatttacagggtatttgcttccgtgggatatgaaggcgctgtttgcgacaaaggtaggtcttcagattgccgaggcgacgccattgatcggagcgcaggtgaaaactcttcttgccggccaccacgatattgtcggcgctcaaacgctgacgagattttttgcgattcacgtattttttctccctgccgctttgtttgcgctcatgggcgcccactttgttatgatccgcaagcagggaatttcaggaccgctttaatacaaatctgatataaaagggaggggatgacatgcaccgggggaaaggaatgaagtttgtaggagattcaaggataccggctgaaaaaaaaccgaatataccgaaagactattcagagtatcctggaaagacagaggcgttttggccgaactttctgctgaaagaatggatggtcggggccgttttcctcgtcgggtttctcgttttaacgattgtgcacgagccgcctttggaacgggtggcggatcctacggatacagggtatattccgctgccggattggtattttctatttttataccagcttttaaaatatgaatatgccgcagggagctacaccgttatcggagcgatgattataccggggcttgccttcgggtcgctgcttttggctccgtttctcgacagggggtctgaaagaaggccgtggaagcgtccggttgctgtcgggatgatgcttttggcgctttgcgctacggtctttttaacgtggcagtcagtcgcgacacatgactgggcaaaggcggaggagcaagggaaaattaaaaaagaagccgccattgatactgaatcagacggttataaggtatttaaagaacaaggctgtatttcctgtcacggggataatcttcaagggggaggcgccggtccgtccctggtcgataacgggctgagcccggaagaaattaaaaaaatcgccgtcaaagggaaagggcagatgccagccggtatttttaaagggaatgacaaacagcttgatcagctggcgaagttcatttctgaaacgacagcgaaataacgtattgtgaagtagacaacagcaggatatactttatgaaaagagctgaccggatgtcagctttttttgcatgatacatactttttacggactgagagttgatggtatgaggtggatttcttatcttttagggttgcgcggcatgcttctgcttgttcttgccgttaattttatcggtacggtgtacggctattattggtatgtgccgcagcttgcggacacgccgttccgatttctgatatttgtgcctgacagcccgacggcgacgtttttcttcctgtttgtgcttctggcatttctcatgggaagaaacgcgccgctgtttgaagcgctggctcttgtaacccttgtaaaatacgggctgtgggcggtcggaatgaatgtctttgtgctggtcaaaatggggcagatgccttgggaagggtatatgctgattgcttcacattttgccatggccgttcaaggcgttttatacagcccgtattttcggttccggttatggcatcttgccgttgctgctgtttggacgcttcataatgacgtcattgattatcttttcggcatgatgccccgctactcaatgctcaatgactatatgcaagagatcggctatgctacattctggctgagcatattttcactcggccttgcatactatttggtgatttctaaaagacggataaagcttgacttacactgatagaatcttggtctaaccttgtcccgctcctcatattctgtaaagagaaggagtgggagggacctctatgaaacgaaagctgacgatctgtcttttacttgctcttatgtgtttcatcacaactgccaaagctgaagatgagggcggtctcaaggaactgaacgacctttcggataccgttttccaaatgacgcggcattcgcagtatgatgaggctctgcaagtgcttggctactttaagaaaaaaatgacacacgtaaactcactgagcggcgccgaagtcaggcaggtgactctgggcttcaatgatttagtgcgcgtcctgaaacaggcagacgcctcagataccgaaaaaatccgggcagccgcccagttcaggttggtaatggatgcgatggaagaccactccgatccgctgtggggttcgcttgaaagaccgattatggcgacattcagcgccttaaaagaagatgtcagcggaaacggaagtggaaatttcaatgaaaagtggaatgaatttatatcattatatgatttaatttatcccagcctgacaatggatgtgtcggccggccagcttgatacggtggcgaaacatatcgaggtgattgagcaggaagggtttcagcagatgacaaaaggaacaaagcttgagcgtctgacactcctgcagcaggatttaaagcgggtttttgacaaggtggagcgggatgacgctgacccttcgctgctctgggtcattctgacaacaggcggtatcattattactgcgctgacatatgtcggctaccgaaaatacagagcggaaaaaaagaaagagaaaaagcgtgagtatcctaagtctaaataaacacaaattgctgtaaaggagctaagtcagtgaaaaaactcatccagcaattggcttcaaaacacctcccgcagccgatcagaggcagaaaaggggcgactgacgaaggaccgcgaaacctcgcgcgtgacttccagaatcctgacatgctcgttccgccttcaacggatgcaggaacggttcaaaacttgaaattctcattttctgatacgcatatgaggcttgaagacggcggatggtccagagaggtgacggtcagggaactgccggtatccaaaaacatcgcggcggtgaacatgaggctgaaaccgggagctgtgcgggagcttcattggcataaagaagccgaatggggatatgtgattaacggaggagtacgtttaactgcggtcgatcaaaatgggcggaattttattgataacgtaagtgaaggggacctgtggtattttccttccggcattcctcattccattcaaggattagagcagggaagtgagtttttgctcgtctttgatgacggctctttttcagaaaacagcaccttttcagtaacggactggtttgcccacaccccgcgcagcgtgctggaggcgaacttcggtgttccgggctatgagctggcttacattcacaagaaagagcgttatatgttccagttggaaccgccgcccccaattgagcgggcagcagtctcttccccggaaggccccgttttagagccgttcagctacaagctttcccggcaggagcctcttgttaccagcgggggaagagtaaagattgtcgattcaaaaacgtttaaggtgtcaaaaacgattgctgcagctcttgtggaggtcgaacccggaggcatgagagaattgcattggcacccgaatacggacgagtggcagtattacctttcaggagaagcgaaaatgacggtgtttgcggcggagggaagagcgcggacatttaactatcaagcgggtgacgtaggatatgttcctgttgcaatgggacattatgttcagaataccggtgacaccgtgcttcgctttctggaaatcttcaaaagcgaccgtttcgaagacgtctccttaaaccaatggctggcactgacgccgcagcgcttcgtcgagcagacgctcaatgtcagtccggcattcgcccgccgattgaaaaagaaaaaatcaccggttgtcaaatggaaacacgaacagtaaaggcggcaaaagccgcctttttattatcgtctgatcggatttttattttcatcaagcgtaaatccttcgccgagcacatcatggacgtcgcttactgcaacaaaggcgtgcgggtcaacggaagtgatgacgcttttcaaaagcacaatttcgtttttcggaacgacgcagtaaagaacgtccctgtcttcttttgtatatgatccctgtccttttaaaacggtgacgccgcgctccatctcttcaatgattttttgctggatcaaatcgtttttcgaagaaataatcgttgccccttttgcggcatagccgccttcctgtataaaatcaatcaatctcgcagcgacaaaaacggctacaagcgtgtacatcgcttccttgtaagaaagatacgtaaacaaagaaagcagaatgacacaggcgtcaaaggcaaacatcgtccggcccatcgggattccgaaaaatttgttgatcagccgagcgatgatatcgaccccgcccgtcgtgccgccgtatttaaaaataatgccgagacccgcgccgataaaaacaccggcgaacaaggcggccagcgctaaatcatgcgacagcggcatatgaatttcgtagcgctgaaaaacactcagaaaaacggaaagagagacggtgccgatcagggtatagacaaacatcgtccggccgagcatacgccagccgatgaaaaagataggaatgtttaataccaggttggaaatagaagggctgatgtggaataacgcatataaaagcagcgtaatgccggtaaatccgccttccgccaaattgttctgcatattaaagtgaaccagtccgaatgaaaaaacagcggcgccgattaaaataaagcaaatgtttttgattctgatttctccaagcattgcatcaaaccccttttccttccataagattgcgtaaatattatagtggatacaaaagaaaacagcaaactgccgtttttaacatttgtcaaatgtacttgaattagctaacatggaagagatgacaggaggtattcgcacagtgagtgacaaaacgatgaaagacttacaagctgaggtcgatgaatatatcggccaattcaaagaaggctatttcagcccgcttgccatgatggcccgtctcacggaagaactgggcgaacttgcaagggaagtcaaccattattatggggaaaagccgaagaaaacgacggaaaatgagaaaagcatggaagaggaaatgggcgatgtgctgttcgttctgatctgcctcgccaactcccttgatatttcattggaggaagctcataaccgcgtcatgcataaatttaatacacgtgataaagaccgctggactagaaaagaagaaggaaagtaggagaaaccatgtcaaatgaaaccattaaagtcgtcattgccggaccgagaggcagaatgggccaggaggccgtaaaacttgccgtccgcacgcctcattttgagcttgtcggcgccattgaccatacatacgatcagcaaacattacgggaagtgatgtcagctgattcagacgctcttatttatacggatatccgcgcatgtttccaagaaacaaaaccggatgtgctgatcgatttgacaacgcctgaaatcggcaaaaaacatacgaaagccgctcttgaacacggcgtccgccccgttgtgggaacgaccggattttctgaagcggatttagaggagcttcaagccttgactgaagaaaaaggaatcggcgccatcatcgctccgaattttgcattgggcgcggtgctgatgatgaagttctcacaaatggccgccaactattttgaagatgtagaaatcattgagcttcatcatgatcaaaagctggatgccccgagcggaacggcgctgaaaacagcggaaatgatttcaagcgtccgtacagaaaagcagcagggccatcctgatgaaaaagaaattctgccgggcgcccgcggtgctgaattaaacggcatccgccttcacagcgtgcgtctgccgggccttatcgcccaccaggaagtcatgttcggcatggacggccagacgctgaaactgcgccatgattcctataaccgggcttcctttatgtcaggagtgaagctgtcagtggagcaagtgatgaaaatcgaccagcttgtatacggactcgaaaatattatcgactgaatcggcaagggggagaacatcaaatgaaaattgctttgattgctcacgataaaaaaaagcaggatatggtccagtttacgaccgcatataaagatatattgagccatcatgagttatacgcgacgggtacgacaggcttaaaaatccaggaagcgaccggattgtccgttgaatgttttcaatccggcccgctcggcggagatcagcaaatcggcgcattgattgcggcaaacgccctggatctcgtcatttttctgcgcgatccgttaactgcgcagcctcacgaaccggatgtctccgcgctgatccggctgtgtgacgtatacgcgatcccgctcgccacaaatatgggaacagcggaaatccttgtccggacgctggacggcggggcatttgatttccgcaatcttgtgcgcggaggagagccgaatgtctgaacacgttgatattctggcgttcggcgcccatagtgatgatgtcgagatcggtatgggcggcacgatcgcaaaatttacggctcaaggaaaaaccgcggtgatatgcgatttgaccgaggccgaactatcatctaacggaacggtagggataagaaaagaagaagcggcagaggcggcacgaattctcggcgtaaaagagagaatccagcttacgcttcccgaccgcgggcttttgaaaagtgaggacggcatccgccggattgtcagtgtcatcagagcctgccggccgaaaaccgttttcatgccttatccgaaagaccgccatcctgaccacggcaatgcggcggctttggtcgaagaagcggtgttctcggcgggaattcataaatacagagatcatcaggaactgccggctcataaggctcagcgcgtatactattatatgatcaacgggtttcaccgtccggactttgtaatcgacataacggaaaccatcgatctgaaaaaagaaagcctgcacgcttatcaaagccagtttattcctacggcgcagtcagtgaacacaccgctgaccaacggttatatcgaaatggtggaagcgcgggaaagactgtatggcaaagaagccgggacggggtatgctgaaggcttcttttcaaaacagcttcccgttttgaatgatgatgtttttgggggcggacaatgagaccattaaaaatagggattacatgctacccgagtgtcggaggctcgggtattattgcgacggaactcggcaagctgcttgcggaaaaagggcaccaggttcatttcatcacatcaagcatcccgttcagattaaatacatatcatccgaatattcattttcatgaggtggaagtcaatcaatacgcggtatttaaacatccgccttatgaccttacactggcgagcaaaatcgccgaggtggccgcgagggaaaatcttgatatcattcacgcgcattatgcgctgccgcatgcggtatgcgcttatctagccaaacagatgctcaagcgtgacatcgggatcgtgacgacgcttcacggtacagacatcaccgttttaggatatgatccgtcattaaaagatttaatccgttttgccatcgaagcgtccgacagagtgacggcggtatcaaccgcgcttgccggagaaacatatgacttaatcaagccggataaaaaaattgagaccatctacaactttattgatgaacgtgtttatcttaagaaaaatacagagagtataaaagagaaacatggtattttgccggatgaaaaggtcgtcatccatgtttcgaacttcagaaaagtaaaacgtgttaaagatgtcatccgcgttttccgtaatatcgcagccaacacaaaggcgaagctcctgcttgtcggtgacgggccggaaaagtgcgtcgcttggcagcttgtcgaaaaatacggactgcaggatcaagtgctgctcctcggaaatcaggacagggtggaagagctgtattccatcagcgatcttaagcttcttctgtctgaaaaagaaagtttcggactcgtcctccttgaggcgatggcctgcggcgtgccgtgcatcggaacaaatatcggcggcatcccggaagtgattaaagatcaagtaagcggttttctggtggaagtcggcgatattcaggcggcatctgaaaaagcgcttgccgttttagaagataaacagctcagcaaacgattgactgatcatgcgctgaaaatggtggagacctccttttcttcgcaaagaatcgtcagtcagtatgaacggatttatgacgaattggcaggaccggagtgatcttatggaacaggaatttgtcaaagccctccccatccttcatcatctgatgaaggcgggccatcaggcgtactttgtcgggggagccgtcagagacagctatatgaaacgaaaaataggtgatgtggacatcgcaaccagcgcttcgccgaatgaggtggagcgcctctttaagcggactgtcgatgtaggaaaagagcacggcaccgtcatcgtcctgtgggaagatgaaacctatgaagtcaccacttttcgtgccgaatcagaatataaggactatcggcgcccggaagctgtgcggttcattacttctttatcagaagacttaaagcggagagacttaacgattaatgcgatggcgatgtctgccgaaggagagctgcttgattatttcggaggcgcacatgatatcggacaaaagctgatccgtacggtgggtaaccctgaagaccgttttcgggaagacgctctgcggatgatgagagccgtccgctttatgagtcagctcggctttctgttagaaaaagaaacaagagaggccgtcataaaagacagggagcttttggcacatgtatcagtagaacgaaagaccgtcgagtttgaaaagctgatgcagggcgctttctcacaagaagcgattcaaacgatggtgcagacaggtctgatacaagagctgcccggcctttccggttatgagcagcaaatgcttgaagcaagcggctttccgttttcttctttagatgcacgcgaagaacgctgggcagcgctgttattgtttctcggtctttgtccgaaaagtgccgaggcgtttttaaaacaatggaaactgccgggaaaggtcataaaaaaagcggtgcagatcataagcgtttatccggcgcagctggaagcagaagcgatgtaccgagcgggagaggcgctgttttcagccgttaaaatcgggatgctgaaacagcataagacgattgatgaacaaaagctgaaagaggttcagagcctgtatgagcagctgccgatcaaaagccttcgagacctcgacatttcaggcgctgatctgatggagctcagaaaccgccgcgcgggtaaatgggtggccgaagaacttcgccggattgaagaagcggtattggcagggaagcttcctaaccgaaaacatgacataaaggagtggctcgcatcatgggatcaacattaagaacccgattaattgatttattttctgaggcgggtgacggctttatctccgggcagaaaataagtgacgcgctcggctgctcgagaaccgccgtttggaaacatatagaggagctccgcaaagagggctatgaggttgaggcggtcagacgaaaagggtacaggctcattaaaaaaccggggaaactcagtgaatccgaaatccgtttcgggctgaaaacagaggttttgggcaaacagcttcattaccgggacgtcctgccgtccacccaaaaaaccgctcatgaacttgccaatgacggcgcgccggaagggaccctcgtagtcgccgataaacaaacggcaggcagaggaagaatggccagagtatggcattcacaggagggaaacgggatttggatgagcctcattctgagacccgacgttcctttgcaaaaaacgccgcagctcaccctgttatccgccgttgcggtcgtacaggccatcgaggcttttacaggcgtacaggccgccattaaatggccgaatgatttaatgattcacggcaaaaaagccgtcgggattttaactgagctgcaggcggaagaggaccgtgtccgttcggttattctcgggatcggcatcaacgtgaaccagcaggaaaccgattttcccggcgagcttcaggacattgcgacgagcctgagcatggaagccggtgaaaaaattgacagagcgggtctgatacaagagattctgctgacttttgaaaaacgctatcaggattacttgaaccacggctttacaccgatcaagctgctatgggaaagctatgcggtcggactggggaacgagctcagagcgagaacgctgcaaggaacgttttacgggaaatcgctcggcattgatgatgagggagttcttcttttggaaacgagagacggtataaagaagatctattctgccgatattgagctcaattaatcttagttggtacaagcctcgtgaatttggtatacttcctatgggcagtatcataatgaactgcacctgatcagcagaacagagattacgaaaagtctgccttgatccaaaaaaggactgggacagagggatgacattcgccgaacgttaaacaagtgggaatccttcttattttacagaaggcttttttgcttgcgaagaattggcggctcatctcctcaccgtttagaggaggagaaacagaatgaaaacaaaactggatttcatgaaaatgaaggaaaacggagagccgatcgtgatgctgaccgcttacgattatccgcaggcaaagcttgcggaacaggcgggagtcgacatgattttagtcggggattcgctcggaatggtcgtgctcggactcgattcaaccgtcggcgtaacggtcagggacatgattcaccatacaaaagcggtaaaacgcggtgcgaaaaatacgtttatcgtaactgacatgccgtttatgtcttaccacctttcaaaagaggatacattgaaaaacgccgcggccattattcaggaaagcggcgcggacgcgttaaagctggaaggcggagacggcgttttcgaatccatccgcgcgctgactctcggcggaattcccgtcgtcagccatttaggcctcacaccgcagtctgtcggcgtattaggcggatataaagtgcagggaaaagatgagcaaagcgcgaaaaagctcattgaagacagtatcaaatgcgagcaggcgggagcgatgatgctcgtgcttgaatgtgtgcctgctgaactgactgctaaaataatagaagaagtatccattcccgtcatcggaatcggagccggttcaaaagcggacggccaagtccttgtctatcatgacgtcgtcggccacggcgtggacagaacaccgaagttcgtgaagcaatacgccaaaatcgacggcacgattgagtcggccctcagcgattatgtccgtgatgtgaaagaacgggttttcccggaagaaaagcattcctttcagataaaccaaactgtgctgcaaggcttatacggaggaaagtaagcgatgaaacaactgacagaaactcaacagctgaaagaattaattgcacaataccgctcagaaggccggacgatcggattcgtcccgacaatgggttttcttcatgaaggacacctgaccctggttgaaaaagcaaacaaagaaaacgatattgtcgtgatgagcatctttgtcaatccgactcaattcggaccgggcgaggattacgaagcatatccgcgagatttaaagcgcgatgcccggcttgcagaacaggcgggagcagatgttttgtttacgccgtctccgagtgacatgtataagggcgagcaaaatgttgccgtgcaagtgaaaaggagaactgacgtgttgtgcggcgtctcccgcgtcggccattttgacggagtggccactgtgctgacgaagtttttcaatctcgttaaaccgacccgcgcctacttcggcctgaaagatgcccagcaggcagcggttgtggacggattgattgaggatttctttatggatatcgaattggttgcagtggacacggtcagagaagaagacggacttgccaaaagctctcgcaacgtctatctgactgagcaggaacgcaaagaagcgccgatgatctataaagcattgcagcaaggtgccgaactggtcagagacggtgaaagaaatccggaaaccgttataaaaaccgtcaccggtatcatcgaaaacacaagcggcgtcattgattatgccgaactgtacgcttatccggagctgactccgcttaaaacattaaacggcaaggtcattctggcctgcgccgtccaattttctaaagccagactgattgataatatcattattgatattgatgaatgggagagatcataatatgtaccgcactatgatggccggaaaactgcaccgcgctaccgtgacggaagccaatttaaactatgtcggcagcatcacgattgatgaagatcttttagatgccgtcggaatgctcgctaatgaaaaagttcagattgtgaataataacaacggagcgagacttgaaacgtatattattcccggtaagcgggggagcggcgtcatctgtttaaacggagctgccgcccgtctcgtccaagaaggagataaagtcattattatttcttatcaaatgatgtctgatcaggaagcaaaaagccatcagccgaaggtggccgttctggatgatcagaataaaatcgagcagatgctgggccaggagccggcacacacgattttgtaaaagagcccccttcatgggggttttcttttaagatttaggggcaaaagctgtttttccgctccatttctcaacaaaacgtgttacacttttctcgtatgcaagaattgaggtgtccattttaatgaacaaacaacggttcgttgtcatagatgtcgaaacaacaggaaattcgccgaaaaagggcgataaaatcattcaaatcgcagcggttgtcattgaaaatggacaaataactgagcggttttcaaaatatatcaatccgaatcaggccatcccgccgtttattgaacagctgaccggaatttcgtccggaatggttgaaaatgaactgccgtttgaagcggtcgcagaggagatttttcatctgcttgacggcgcgtattttgttgcccacaatattcatttcgacctcggatttgtccggcatgaactgagcgaagcgggctatgagctgccggattgtgaagtgcttgatacggttgagctttcgcgtattgttttcccggggtttgaaggatataagctcggtgagttgtgcgcagagctgaatattgttcatgaccgccctcaccgcgcagacagcgatgcggaggttacgggcctggtctttttagacattttacataaactgaaacatctgcctttaccgacgttaaagcagcttagaaggctttcacagcattttatcagcgatttgacgctgcttttggattcttttattcatgaaagcaggccggcggaagaaaagagctgcattccatacgcctctttttcaattaaagagcccgatcacattccggtttcccgtccggtgaatgcggccattgaccttgaaaagtggaacgaagaaaaagaacagatcttgtccggcatcatcccccgctatgaaaagcggaaaggacagcttacgatgatggatgaagtgcttggcgccttccgcaatcgggagcatgcgctgattgaagcggcgcccggcatcggaaaaacgatcggttatctcgttccggctgttttatttgccaaagcggaacaaactcccgtcattatcagcacgtactctactcttttgcagcagcagatcatgtctaaagatcttccgcttttggagcgtatgtttccttggccggtcaaagctgctattttaaaagggaaatcacattatctgtgcctgccgaagtttgaacatattctgcatgaggaagatgacaactatgatgcggttttgacgaaagcgcagcttctcgtctggctgacggagactgaaacgggcgacgccgctgagctgaatcttccatcaggcggcagattgctgtgggagcgcatggcttacgatgagaattcttttatgaaaaaagggaaggactcggctgccgggttttatgaacgggctaaagaaaaagcgcaggccgcagatctgattatcacaaaccatgctttgctgttttcagatcaaagcagtgaaacgaaaaaactgcctgcaagcggaacggtcatcattgatgaagcgcatcatttcgaacgcgccgccagcgagcacctggggaagagagcttcatacatcggactgcacacaaagctcagccgaatcgggaccttaaaggaacacggactgttaaagcggatgagaaaactgttttatacgtatgaactgccggcggaaagtttttttgacgccgatgagtggatgaagcatattcaatcggaaagcgacgcatttttcagttcagtgcattcttttgtcaaacgaagaaaacctaaagacgatctgaaccgtctcgtctatagtctcaatcataaaagccaggataaagggtttcacatgataacggacggagcggagcggctttgtgcgatgcttgatcagctgcttgacatgttttccgtacaggagaaactgttacatcaaaagcttgatcagatgaaaagcggagcggcttttttagcgggcgaatatgtaaagtgtatcagggggctgaaagaatatcgcgatacgttcagcaggctgctgtttgaaaatgatgagaaagaagccgtttgggttgaaattgatgcgaagggcgcaaaaaatgccgtcagcatctatgcgcagcctttggagcccggtgaaatgctggcagaccagtttttcgcccgcaaaaaaagcgttgtgctcacatcagcgaccttaatggtggagcagtcttttcaatttatgattgaaaggctcggacttgcggatttttatccgcgcaccaaaagcatcccgtctcctttttcttacgatgatcagatgaacgtcatcattccgaaagagatgaaatccgttaaatatgacggggagcgggaagtcattgagcatattgccaagtatgcagaaatcatgtcaaagggaaaacagccgaagatccttgtcctgtttacgtctcatgatatgctgaaaaaagtgtatcaggaactgaaactcagtatggagatctcaggcattcagcttctcgcccaaggtatttcaggcgggagtcccggtaaattaatgaaaacctttaaaacggcaagccggtcgattttgctcggaacgaatcatttctgggaaggcgttgattttccgggggatgaattgtcaaccgtcatgatcgcaagacttcctttcagggcgcctgataatccgcttcacgccgcaaaatgcgaatttgccaagaagcaggggaaaaatccgtttcagacgatttccctgcctgaggccgtgttaacgttcagacaggggatcgggcgcctgctccgtacggcgggagacaagggaacgatcgttcttttagatcagcgtgtaaagacggcgggatacggacggctgtttcttgaagcgctcccgacttcatcccttttggagctgacggatgccgaactcggggcttatgtcagccaaacggaataaaagccgcataaacgcggctttcgtggtgtgggatgaggaattgtttttatagtaaaagcgggttcatgccgccttgtgattttattatgccgcgggcgcatcccgttatgactaacaaaatttgttcgaccgatggagggtataaaaatggaaagcaaaattgaaattctgtcaacgattaatgtggagcattcagatgatttatataaaatcgtcgatacattaaaccggactttgaaacgggacaacctgatgttcggccttgcgctcgacgaagaaaatcaaaatgaagcggtcttcaccatttatcgcacataggtgaaaaagatgagaaaaaaagcattaatatttacagccgtatttggtattatttttttagcagttcttttattttcggccagcatttttaaatctgcaatggctcaaaaagaagaaggccacgaaacagctgccgcagccgctaaagaaaaaacgaatctgacagacgctgagaaagtggagacctttgtcggcaaacagaaatattatgttgttaccggaacggataaacatggaaaagatatgtatgtatgggttccggccgacaaaaaagcaaaaattctctcaaaaaaagccagtgacggcatttcaagcggcaaggctgccaagatcgttcgggacgaagggcttgtttccaagctgaatggcgttcacccggcgagagaaaacaatgttccgttatgggaagtgacctatatcaacaaaagcgggcagtatagctttagctatgtggactttacaagcggcaagattctcaaaaacatcacaccgtgagacgtattagggggagttcaagttgaaattggcaaaaagagtatccgcattaacaccgtctgcaacacttgcaattaccgcaaaagcgaaagagctgaaagcggaaggccatgatgtcatcggcctcggagcaggagaaccggattttaatacgcctcagcacattatagatgccgcggtgcgttccatgaatgaaggctatacgaaatatacgccttcaggcggtctgccggccttgaaagacagtatcgcaaaaaaattcaaaaacgatcaggggattgaatataagccgtcagaaatcattgtctgcactggagcgaaacacgctctgtatacattatttcaggtcattctcgatgaaggggacgaagtgattataccgactccttactgggtcagctatcctgagcaggtgaaactggcaggggggcgtcccgtctatgcagaagggctggaatccaatcagtttaaaatttcaccggagcagctgaagcaggctatcaccgagaaaacaaaagccctcattatcaattcaccgagcaacccgacaggtgttatgtatacgaaggaagagcttgcggaactcggaaaagtgtgtctggagcatggcattctgatcgtttctgacgagatttatgagaagcttacatacggaggaaaaaaacacgtctcaatcgcacagctttcagatgaattgaaagagcagacgattatcattaacggcgtttcgaaatctcacagcatgacgggctggaggatcggctatgcggcgggttcggagacgattattaaagcgatgacgagccttgcgagccacagcacatccaatccgacgtccatcgctcaatacggcgccattgcggcctataacgggccggctgagccgcttgaagagatgagacaggcatttgaggacagactgaataccatttacgctcagctcagtgagattcccggattcacctgtgtcaaacctgaaggggcgttttacttgttccctaacgccaaagcggccgcagaaaactgcggattcaaagatgtcgatgaatacgtcaaggcgcttctggaagaagaaaaagtcgccatcgtgccgggctcgggtttcggttcaccggacaacgtccgcttatcttacgcaacgtcactcgatcttttagaagaagcggtcaagagaatccgccgctttacggaaaaacacagctgattctgaaaaagcggcttttaaagccgcttttcacttgcattgaccccgttagagtagaacgggtataataaagtgatgaaaaaagagattcaggcagattcctgaatgtctttcttgttctggagggaaagagtttgaaaacaacaatcaaccaagtgtataaacacacaggcgaggaagtaacgattggagcttgggtcgctaataaacgctcaagcggtaaaatcgcatttttacagctgagagacggtaccggcttcattcagggagttgtcgtcaaagctgaagtagaagaagacatcttccaaattgcgaaatcagtgacgcaggaaacgtcactttatgtaaaaggaattgtgaaagaggacgagcgttcaccgcttggctatgagcttgctgttacatccattgaagtcattcacgaagcgactgattatccgattacgcctaaagagcacggtacggaattcttaatggatcacagacatttatggctccgttcgaaacgccagcacgcgattatgaaaatccgtaacgaaatcatccgtgcgacttatgaatttttcaacaaagaaggcttcgtgaaagttgatccgccgattttgacgggaagcgctcccgaaggcacgactgagctgttcgcgacgaaatattttgatgaagacgccttcttgtctcaaagcggccagctgtatatggaagcagctgcaatggcgctcggaaaagtattctctttcggaccgacgttcagagcggaaaaatcgaaaacgaaacgccatctcatcgaattctggatgattgagcctgaaatggcatttgttgaatttgaagaaaaccttgaagttcaggagaattatgttgcatacatcgtacaaagtgtgctggaacattgtaagatcgagctgaacacattaggaagagacacatcgaagcttgaacaaatcaaagcgccattcccgcgcattacgtacgataaagcgattgaattcctgaaagaaaaaggctttgacgatattgagtggggagatgacttcggtgcgccgcatgaaacagcgatcgcagaaagctatgacaaaccggtgtttatcactcattacccgacgtcattaaaaccgttctatatgcagcctgccaaagatcgtgacgatgtcgtgttatgtgccgacttaatcgctccggaaggctacggggaaatcatcggcggttcagaacgcgttcatgatatggatttattggaagaaagattaaaagaacacggtctggattcagatgcttacaaatggtatgctgaactcagacaatacggttctgttccgcactccggcttcggtctcggacttgagcggacagtggcttggatcagcggagcgcctcacgtgcgtgaaacgattccgttcccgagacttctgaaccgtctgtatccgtaatagttatgaaaaacgaagtctcctgcaagggagactttttctaagtaaaggggaaagctcccggagataaccttttacagtaagaggtgtaaggatgaaaaaacagcaatttatagatatgcaggaactcggcatttcaagcattcccaacctgctgctgacacattaccggcagctcgggctgaatgaaaccgaattgatcctgcttttgaagattaaaatgcatttggaaaagggctcttattttccgacgccgtttgaacttcaatcaggcatgtccatctctgctgaagagtgtacaagctgcctgagaatgtttattcaaaaaggttttctgtttattgaagaatgtgaagaccataacggcataaagtttgaaaaatattctctgcagccgttatgggcgaagctgtatgattacatgcagcattctcaaaatgaaacgcaggaaagaacgtcagaaagagaacaaaaaagcctgtataccatctttgaagaagagttcggaagaccgctgtcgccgcttgaatgcgagacgctggccatatggcaggatcaggatcagcatgatgcgattctgattaaacacgccttaaaagaagccgttttatcggggaaactcagttttcgctatattgaccggattttatttgaatggaaaaagaatggcttcaaaacggttgagcaggcgaaggcgcacagccaaaaattccggcgtgttcaaacgaaacagaatgatccgcaaaaagagtatacgaggcaggtacctttttacaattggctggaacaataacatgagaaggggagaaacgtgttaaatttaaagcagattgaatattgtcttgaaaaaatcggcgatatgtttccgcacgcagaatgtgaacttgtccattcaaatcctttcgaattggttgtggcagtcgcattatccgcgcaatgtacggacgctctcgtcaacagagtgacaaaaacgctatttcaaaaatataaacggcctgaagattatcttgccgtatcgctggaagaactccagcaggatattaaatcaatcggtctgtaccgtaataaagccaaaaatattcaaaagctgagcaaaatgatcattgaagagtacggcggagaagtgccgaaagaccgggatgagcttgtgaagctgccgggtgtcggacggaaaacggcaaatgtggtcgtgtctgttgctttcggcgtacctgcgatcgcagtagacactcatgtggagcgggtctctaaacggctcggcatctgccgctggaaggactctgttttggaagtagagaaaacattaatgaaaaaagtgccgaaagaggattggtctgttacgcatcacagattaatatttttcggccggtatcactgtaaagcgcaatctccccgctgtgcggaatgtcctttgcttccgctatgcagagaagggcagaagcgtgacaaaaaagggctggtgaaacggtgacggcgattgacattctggcaggctatgaaacatacctgcgcagccttacggacttggaaagcctcgagatcaaagcggcgctgcgccgccatccgctgtatatggatttcagcggccagccaacagtgcagccatggagggaaaggggcgaatatgtcccgtttctttttcagatttggaatgaaacgaaagaaacgctgcttcccgtttttcaaacaagaaaatcgaggtgtgatcaaaatgacatgctgaagggaatagcctgtctgattgccgcttttcattggacggcaggggagcgggtcacatcactcgactggactgtgcttgaaacaaagcattttcccgcggaaccgatcaattgggcggagcgaatggcgtttattttaacaaaaccgactcaatatcactcgtttattcagctggatgaattgatgacggagatgaagaaacaatatcataaatatgaagccatgaacaaatgttaaaaacctccttttcccataaggaggttttttgtacgaaaaaaatccttcacctgtttggggtgaaggatttcgtccgctaatgagcgggatttgactggatggttgacgaattggactgcccgttgatagttgaagatgagtcttggtttttatccgtttgaccgctgtcaggtttatttgagccgtctgaaccggaatcggaatcattatcagagccgttatcttgctgtccgttgttatcggtcccgttgccgggctgattctgattgttgttatctgtttgatccttatcggattgatcctgatttttatccgggtcatcagttggtgtttgatccgatccgtcagacgtatctgtctgatcgtcatctttgtttgaatcatcggtttgcgtcttgtccttatctttatcttcatcagtcttctgttcatcgtcagtcgctttatctttatccgcatcgtcttcttcatctttcgggactttgaaagatgctgatgccgtatcgctttttccgtcatcgttttccgctgtcacctggaagctgtatgtggagcctggcgtgacatttgagacgacggcttcttttgccgaactgttttgaatgtcactgtagcttccgccgtcaacggattgtttgacattgaatgttgcatcaccgtcataatcccagcttaaggttaatgattttttatctttgtcgtatttcacttgcaatcctgtcggtttatcggctttttctttcgtgtacgttttagaaacggcagttggctgcgttcctttcacgaagtactccgtcacttttttatcatccggcgtattcggtccggctaaagcggcaggattcgagcctttctcaactgtttcttttacaacgctgtcaggctgcttgaagcttcctttaccgtcatcaacgtatgagatcagcttttggaaaatccgttttgcgacttgctggtctgcagaagacagtgatttcttgcctgctttgttgccagactcaactccggtccaaaccgccgctgtatattgaggggtgtatccgacaaaccatgagtctgggactccgcctggagcaatgttatatttttgaatgtcctctttagtaaagttggtcgtacccgttttaccggcgacttccacgttcgccacctgagccagtttacctgttcctgattcgacagctgatttgagcatatctgtaatcataaacgctgtgtagtcgctcatagcacttttcggtttcggtgttaaatcaagcttagtgccgtcattaaattcaatcgatgtgaccgcgtgcggttcgttgtacgttccgttatttccgaacgcactgtaggcgcctgccatggtcatagtagatacaccgcggttaccctcaccaaatcccccgatagagtagggttcatatacttgatctttgtttaatcccaatcctaagtcgtttgcgaagtcgacggcatgatcttttcctgctgcttggtatgcttttaaagcaggaatattacgtgagtctgcgagggcctctcgcattgatatctggcctctgtatttattgtcccaatcatgaatcggtgtgccgtcagagtacgtataagctgagtcgtcaatctgttcatacgtcgaccattttttattttcaatgaccggtccgtaatcaagaatcggttttatcgtcgaaccgggctgggttttaccttgtgttgcataattgaatcccccggtagttctgttccgtcctgccccgatggcgcggatttctccgtttgtcgtatcaaggagcgtgacgccgccctgcatgccttcggtaaatccggctgtatcgccgttcatcaattgatcaagataatcttgtgctttcgtatcaagagtcgtgtaaattttcagtccgtcagttgaaatatcgacgtctttcttttcttttgtctcaatttctttcataacttcttcgacaaaagcgctgtatttatttgtgtcctttttatcgtattccttttggctgacgacgccttcatctttcatggacactttcttcgctttttggtattcagagtttgaaatgaatccttgtttttccattaagctgagaacgatgtttcgtcgtttttcggaagccttcgggtttttaaccgggttatatccggtcgggctttgcggcattccggcaagcgttgccgcctgttcaaccgtaagcttgctcaagtcttttacgccgaagaattcttcagccgcttttccgacgccgtaggcgcgcggtgagaaataaattctgtttaaatacatttctaagatttcatctttagaataatggcgctccagctgcagggaaagccacacttcctgtgctttccgtttaatcgttttctgatgggtcaaaagcgagtttttcacaacctgctgggtgattgtgcttcctccctctgaaccgaacccatccgtaaagttggcgaccaaagcgcctccgatacgaatcgggtctataccgtggtgcttataaaaacgggcgtcttcagttgcgataaatgcttctttcacaacatcgggtatatccttaatcgggacgtaggttcgtttttcaccgcccacttccgcgatttcttttccgtttttatcgtaaatcgttgaagagtaaggcgttttcagcttggcttcgtccaaagacggcgcgccggaaaccaaaacggcaaatgccgccgctccgccgactatgccaaggacaaacagaataaccaaggacagcacaatctttttgaataaaccgcctttacgctgtttcttgccttttttcggtgaagagggcttagtgcttttcgtctgccttgccttacggcgttcttcacggctcgtaaattgatctgacataacatctcaacctttcgtttatcaacctttcgctcagtctactgttcctgcgaaaaataaagctgttcaataatactaatataatcaattctcggtgagtatccaagggaaatcggaaaggaagcatcttctaattcgtctttgcgaattgattttctgccgttcttctcctttctctcccaaaagacaaacagcttgtcggcttcgaggaaataaacctttccgaaagcggatataataacaaaacaaatgccgtcttgcctgaccacctgcttcatatgctcaatctgatgatcatgaaaattctgcaggggaaatgccgttttgttttttgtttcttttgcctcgaaatcgatgtagcgtcctttataaatgccgttgtagtcagttgttgaagactgtttaaaataagcttccttaatgactgcggcgcttcttttcggatagtggacgtttacaatctggacgggtgtcggctttttgtgaatgacagcaatttggttagccagataatacttattcgtttcattcaggtcgtcttcgagggtcatgccgcgattactgtatgaatgagaccgtttctggctgttttgggatgaaaccgttttgttcggctgaaaagtttttccattcgggtaccgaatcactttttccatcctccttatcaaactaatagtgacggaagtgaatgaacgtgcataaacgacagaccgtaaccgccattcttcgcctgatcgaaaaagagacgaaaataaaaaatgccgataatatttcccggacgaatgcctataaagcatattatgaccgccatcctgagatcaagtggccgcttttggcatcctttgtgtcccgcaatgcgggctggtcgatgactgatttaagaggcgtcctttatcaggagggccttgacagcagtcagaaaaactggtttttcctttcgtatgaaagggcgaattggctgattttttctgatgcctatcctcagcttctggtctaccagtggtcaaaacaaatcggcgaacctcttttccgtcatcttccttatttccgcgtctcggcttttatgcaggaagaatggttccgcttttggcgtgacggagatacggaacggctcatgtatgctcttattataaatgaacaaaacactatccaagcacctattatacaaaatccttcgtttaaaaagaatgtttttggcacgattcctttttatttaagtgattggtttcactttaatacggtgatattcccttcatttgacggacatttatacggaatttccgtcaaacggttttcaaaaaccgaagagagaattacgctcggaaaacagctggcccgccttctgttcagccctgatcttcacgcttctttttaccgttttcttgataccgttcctcataccggttcacgctttgatatggagaaaatgatcggcatcaaaaaaagaacatcaccgatgcttaggacaacctatcccattgttgcccacccattagacggcgaaagggcggattggtttcaaaaaaggttaagaaaaggggctttcttacaggagaaaatgccgaaacagcttgaactgacggactggtacttccagaaaagacgggagctccatgcgctcttcgcggttaaagagtggctgaagaaatgaaaaagcccgaaaccgttcgctggggtttcgggctgctgatgtgttacgtggaagggcggtttgggccgcctaattttttatcaagcgtatcagtcgtttttgcttcggttttttgctgtttacctgcatttttcggtctcgttttcatacggcacctcctcaactgtatcgtttgcattaacgtgccggttcatacaaagtttgcggcacttttttgtcgaaaggcacgccttttaggataatctctgtttgtttgccgaactgcttctagttttgtcatgtgcagaggagagcggtatgaaaacgagaattatatttgaaagagatgcaagtgataaaagggaggaacatgaatgtctgtttacacgagcaaggctgatattctccgtctgctttctgatatcgaaatccggatttctgctgctgaaaaaacgcttacccaagcagtcagatgctgtcaggcggaagctgaagaaatcagacaggagaaactttcccgtcttgaggaagaggcgcgggagcttcatgtttgtattgatgacctgtttttgactgaccggcgtaaaaaggatttgccgcgagtctgccggataagctgattttgtgcaaaaactttggtaccatatgtactgaggtgagtccgtttgcagacacagtcgttattggagctgacagaacaaatgatagaggcggttctggaagccgaaaaaaggtatcaggatggaaaagagtcaggccgttcatatgatttttttgagacgattaaacccgatgttgaaaaaagagaccggctttgcgcgctttggacagaagcagcgcttgcgtttattcaggaaaaccgtccgaaatacgttcatcatgcacaaattcaggccgttacagaaaatttcggggagctgatgctccaatcatatgttcatcatattcataaaaaaagatacagggatttaactgaatctgttttatatacgcttcgtatattaagggatgaaattgaaaaagaaggcagctgaaaacggctgccttcttttatataaaggggtcgggtatgttattcatacgccgggttttctgctccacttgcttcgagaaccttcatactgtttcgaaattcggttgcggtgagatggccttgaatatagaggaattttgcaaagtccatcagtttatctgcacaatctgtttcatattttttcacttcagcaaaacgctttcttaagtatgatacgttcataatggtgcatcccctctcatgtatgttgagattatgttaacataacgattcgacttttttctgtttttaaaaaattaagactttcgacagcatttgacaaagagcagaatcaccgaaagcacataaccaaggcggaattcatacatatatagcagaaacttagtgagagacaaggggggaatgtcatatgcaatggagagcgcagccatatcaaaatatgtaccagcagccggcgggatatttctacccgcagcagatacagccattacagccgccgtatccgcagcagatacagccattgcaacagccgccatatcatcagcaagggcagtacccgcagcaattttatccgaatcaggaatacggtcatatacagcagccgtttgctcctgctcctcctcaggcaggcatgcccgggggccagccggggtttgtgaatccttaccccgttcccagaccgaatcagcagcagtcttcccaattctcaggcatactctcccagtttaaaaaaacgaacggacagtttgactttaataaaatgatggatacaacggggcagatggtaagcgccgtaaatcaggtcggatcgctggtgaaaggcttcaccagtatcttcaaataaaaagcatgaatgatatccatcattcatgcttattttttagggaaaaagaaggtaagcgtctgttcattccaggatgtttccatatcttcttcacttaccttatacgggaggacaacggttcttgtcatgcttgaagacacatgggatgattgagcctgtttatgatcgtagcggattgtaacgtgaaggtagcaccctttcgtttccaccagcatatccccgtcacggaacgtctcgggaacgccgatatcaaccgcgagccccgtcggctcttctctgacgtcaatcgtcacttgcgcttcagtaaaagccgaattgacaaggtgctgaaaaccctgcatcaattctgcgaagggacctgagtgaaaaaattggtccatcgcatggctgatgatgtcctcattactttgcggatcaagtttatcgttttgggattgatccatatgaccaccgcctttttacaaacagactatgcgatgctatgccgtatggttaagaattgaaggaaaaaagaaagtatggttaaatagtggagaataaactggtaacggattcacatttaggaaggggagcacaacacattgctgaaaaaattattcggattgggagacagccggaaaaagccggccgaggaagtgattttttctccggctgacggagcggtgatggatttggcttcagtgccggatcctgtattttcacaaaaaatgatgggggacgggatcgccgtcgagcctgcaaacggagaaattgtttcaccggttgagggagaagtgattcagctgttccatacaaaacacgctgtcggcatccgcaccctttccggagcggaacttttgatacatgtcggtttggataccgtcaatatgaacggcgaaggctttgaagcgcatgtaaaagaaggagacaaagtgaaaacaggcgatctgcttttaacgtgccggctggatttaataaaagaaaaagcaagcagcaccgtcatccctatggtgattatgaatggcgatgccgcagaacctttgcaatttgcaggcgcaaatgaagcgaaaaaaggacaaacagagctttttacgataaaaatgaagtaggcaggggctgattccctgctttttttcttgtgcaggattttcatctagccaggcaaacaaatattcggtaaactgtacctcataaagaggtgtgaacgatgaagaaaaaatcactgagcgaactgattcaggaattaaaaaatcatgaaaatattgtgcattggcatgaagaggaaccgcgggaggcgaaaacgatgccgatgccggagcaagtagatccgaacattcgggcggctctcgaaaagagggggatcgagcggctttttacacatcaatactccgcttttcagacggttcaaaacggagaaagcattgtggccgtcacaccgacggcctccggaaaaacactgtgctataatcttccggttcttcagtctatcgcggaagatgccacaagccgcgcactttatttatttccgacaaaggcgctcgcgcaggatcaaaaaagcgagctgaatgaaatcatagacgagacgggcatggatattaaaagcttcacctatgacggagatacgtctccggctatcaggcagaaagtcagaaaggccgggcatattgtgatcacaaatcccgatatgcttcattcagccattcttccccatcatacaaaatgggtgagtctgtttgaaaacctgaaatatatcgtcattgatgaattacatacgtaccgcggtgtattcggcagccatgtggcgaacgtcatccgccgtttaatgagaatctgcgctttttacggaagcaagccgtcatttatctgtacatccgccacaatcgccaatccgagggagttggcggagcagctgacgggaaaatctgtgcgcctgattgacgacaacggtgccccggcaggaagaaagcactttgctttttacaatcctccgattgtaaataaaccgctgcatattcgaaaaagcgccaccgtggaagtgaacgaacttgccaaaacttttttaaaaaataagatccagacgattgtttttgccagaagccgtgtccgggtcgaaattattttaagccacattcaggagatcgtaaaaaaagaaatcggcgcgaagtctgtcagaggctatcgcggcggatatctaccgaaagaaagaagagaaatagagcgggggttaagagacggcagcattctcggcgttgtcagcacaaacgcactggagctcggcgttgatatcggccagcttcaggtctgcgtgatgacggggtacccgggcagtgtcgcgagcgcatggcagcaggcgggccgggccggacggcggcagggagaggcgcttatcgtgatggtggcgaactctgatccgattgaccaatatattgtgcgccatcctgattatttctttaaacgctcgcctgaatctgcaaggattaatcccgataatctcattatattggtcgaccacctgaaatgcgccgcatatgagctgcctttcagagccgatgaaacattcggagaaaatgatgcgagggacattctcgagtatttagaggaagaaggggtgcttcacgaaaaccgcgaacgctatcactgggcgagcgaatcttttcccgcctccaatatcagtctccgttcggcgtcacaggaaaacgtggtcatcgttgaccggtcagagacggctgatgtaaaaatcatcggagaaatggaccgcttcagcgcgatgacgcttcttcatgatgaagcgatttatcttcatgaaggggtgcagtatcaggttgaaaagcttgattgggaacataaaaaagcgtacgtgcgaaaggtcgatgtcgaatattatacagatgccaatttagcggtgcagctgaaagtgctggacattgacagaacggacagcagaaagaaaacggccttacatttcggcgacgtcaccgtgaacgcacttccgacaatatttaaaaaaattaaaatgacgacatttgaaaatataggatcaggaccgattcatcttcctgaagaagaactgcataccagtgcagtctggcttgaattaaaagaaacggattcggaaatcggcgaaaaaacgcttgaacagctgcttttaggcattgcccacgtcctgcagcatatcgtgcctgtatacgtcatgtgcgatcgaaatgacgtgcatgtcgtgccgcaaatcaaagccgcacatacgggacttccgacaatctttctgtatgatcattatccgggcggaatcggacttgccgatgaagtatataaacgatttgatgaaatcaatgaaggggctgagcgcctgatccgacaatgtccatgtcaagacgggtgtccttcctgcatcggctccgaaatagaaggaatagatgcaaagaaagcgatactccggctcttgaattacgtgtaaaagaaaagggggacgaaagatgtccttgaaaaataaattaaagcggatgaaaaaccacctgaatgtgccggaagctgaaaaaaagccggcagcttcacaactttcggtcccggatattcaagtcccgtttagagaagaatgggaggcattcggagtgaagcctttcttttttgaggatgaatactgtcttatccgcgaaaccgtctatccgctttcgcaccgccacggacggtacagcttcagtgaacttgatgacgtcatggcattatggaataaaggcggtttgacacatactttatcagcagaaggatacgaaaaaagccagctgttcttctttgatactgaaacgaccggcctcggcggcggggcaggcaatatgatctttttgctcggccatgcaagagtgtatgaagaccgtgtcgcggttaaacagcatctgctccctaaaccgggaaacgagacagctctttacaaaagctttttaagtgaggttgacattacgtcccttgttacgtataacggaaaagcctttgactggccgcaggtaaaaaccaggcatacattgctgcgggacaggcttccgaaacttcctgacttcgggcactttgatcttctgcacggggcgagacggctttggaaacataaattagagcgtgtatcgctttcggcggttgaaaatgaagagcttgcttttaaaagggacgaagacacccctggttatttggcgccgatgctgtattttcaatttttaaaggcggaggacccggctcttttaaagggagtgctctcgcataatgaacaagatgtgctttccctcatcgctctttacatccatatgtcaaaaaagatttttgcatcttctgatcagacgtcagaacgtcaggaagcatacgccatggcgaaatggtttatcgctcataaagaaaccgatcgcgccgttttgcagctggaagcgctgcaaggcaaagactttgaagattcggatcgggccctttttgacttagcgatgctttataaaaaacaaaaccgcaggcaagacgccgtgcccctttgggagaaactgacggactctgatcttcacacatgcagacaccaatcagcggttgagctggcgatctattttgagcaccatgcaaaagattacaaaaaagctctgcaggccgcgcagcaggcggcagaagacggggaaatatcggaaaaagaagccgagaagctccatgtgagaattgcccggctcaagaggaaatattcctcttgaaatattgcccgggaaagcgcaaaagccgagctgtttcgccaaaaatatttttttctgaatccgcatcgattttgttgtagaatggtgccgcatcttgtaaaatagcgttagttatttataggggagagttggtatgtataaaggtgttttttacttgttctttgtcgtggtttttttgattgcgtttgtattttcgaattttaaagacagtttgctgacacacttttaaattgggtgattgaattagaacatgcaccctcttttcttcataacctaacagtgtaataaaagttaatggagaggggatttagcatgtttcatcatcattgttgcagaccaaacgtgatgccgccgattgtccatccgactcattgctgtgaacaccattgcttttctaacacggttgtgccgcatattcatccgcaacatacaactaacgtaaatcaccacaactttgagcacgttcattactatccgcacactttttcaaatgttgacccgacaactcaccagcattttcagtgcggaagcccttgctgcgatcattagtattgaacgcttaagcaagatcggttaggatatcagcaaatcaaaatggggcccgatggggagccccattttttaagcaggtgattaattgaaagtattagccgtaacggggtacaagccgtttgagctcggtatctttaaacaggatgaccgggcgcttgtttatataaaaaaggcgatagaaaccagactcagaagctttattgacgaaggcttggaatggattctcatatccggacagctggggactgagctttgggcggcagaaacggcgtacgatctcagagaagagtatccggaattaaaggttgccgttatcacgcctttctacggccaggaggaaaagtggaaggagccgaataaagaaatgtatgaagcggtgcttgctcaggcagattatgaggagagcctgacgcatcggccgtacgaaagtccgctccaattccggcagaaaaacgcgttctttattgaaaagtcagatgcgcttttgcttttatatgatccggaggtggaaggatcgccgaaatatatgctgcagcaggcagaaaaacgccgtgaaacagacggatatccgatttattcgattacgatggatgatctccgtgccgccgttgaggaagaagatttctttacataacacgtcagagaatatttgacaacgggacgtgtttctgaataaaatataacatgatgattcacgatatgaggtgaaaaagatgcttgctgataaagtaaagctttctgcgaaagacattttggaaaaagaatttaaaacaggcgttagaggttacagacaagaagacgttgacaaatttttagatatgattattaaggattatgaaacctttcatcaagaaattgaagaactgcagcaggaaaatctgcagctgaaaaaacagcttgaagaagctagcaaaaaacagccggtgcagtccaatacgaccaactttgatattctgaaaaggctgtccaaccttgagaaacatgtattcggcagcaaactttatgacgaataaggcagatgcacttgtcaaatgagacaagttgctttataatgaacaagtgttcttaacgttcgggtaatcgctgcaggtctttgaatctgtagaggaaagtccatgctcgcacggtgctgagatgcccgtagtgttcgtgcctagcgaagaaataagctagggcagccttgataggctgacggcaggaaaaaagcctacgtctccggatatggctgagtatccttgaaagtgccacagtgacgaagtctcatcagaaatgttgagagtggaacgcggtaaacccctcgagcgagaaacccaaattttggtaggggaaccttcttgaaggaactgaacagatagaaggacagaatactttctgtagatagatgattgccgcctgagtacgaggtgatgagccgattgcagtacgacggaacaaaacatggcttacagaacgttaaacattattgatatgacaaattagagctctcctttaaaggggagcttttatcttgaatgaaacgaaagcttaaaagagacagggtgatacgatgaagaagtacacactaatagcgacggcgccgatgggaattgaagcgatcgtcgccaaagaagtgcgtgatttaggttatgaatgcaaagtagacaacggaaaagtcatttttgaaggagatgcgcttgcgatctgccgcgctaacttatggctgcggacggctgaccgcatcaaagtacaggtcgccgagtttcaggcaaaaacgtttgatgagctgtttgaaaaaacaaaagcgattgactggcgcgcgtacattccagaaaacgcaaagttccccgttatcggaaagtccgtgaaatcagtgcttgccagtgtgcctgactgccagcggatcgtcaaaaaggcgatagcgggaaagctgaaacttcaatcaggaaaacaaaatgaatggattgaagaaacgggacccgagtataaggtggagatttcccttttaaaagataaagccgtacttacactggattcatcaggaacaggccttcacaaacggggatacagggttgatcagggcggagctccgattaaagagacgctcgctgccgcgttaattctgttaaccaactggacgcctgaccgtccgttcgtcgatccgttctgcggttccggcacgatcgccatcgaagccgctttaatcgggcaaaacattgctccgggttttaaccgtgattttgcttcagaagactgggaatggatcggaaaagaactgtgggacaaggcgcgccttgaagtggaagaaaaggcgaactatgatcagccgctgcagatttttgccagtgacgtggatcaccggatggtaaacatcgccaaagaaaacgcagaagaagcgggacttggggacctgatcgaatgcaagcagatgcgagtgcaggattttacgacgaaactcgaattcggcgttatcgtcggaaaccctccgtacggcgaacggctcggcgaaaaaaagcaagtcgagcagatgtataaagaaatgggccgggcatttgaatctcttgatacatggtctgtctacatgttaacgtcaaatgaacaatttgaagaggtctacggaagaaaagcaacaaaaaaacggaagctctttaacggttttatcaaaacggattattatcagtactgggctaaagtgcggccgcagcggaaaaagccgcaacaaagagaagacgcctgatacagcgtcttctccggcatctttacgttttattctgccattaccagcggtgcgcttttgcgttgctccgtaaaataatgttggtctgggacatttcggtgtggccgttcacctgcgatttagagcgtttcggccgcgtccaattgtgatgaaacaattcagaatgctgatctaatcgatctttataactcatgtaaccatcactcccggatagaataattttgtgaagatggatattcgatcgaatatctgttgtagtttgtgcaggtcaggtgcggatcattcaggatggcatgtatagaaagtgaagcatcggcatagaatgatgattatttctatttgagaggtgatcttattttatgctgaacagcgagcacttcagtaaaatacaaaaggcgttagacgcaactgctttccggctggaggaagccggagctaagttcggtccttccgtcatgacacacgcacaggaagaacttgaaaatgcggtaaaacatacacattcaacagaccatccgttcctatgtacacatatcattaaccggaaatgataatgacaaaaacttggcgaggccaagtttttttgttgtattgaaaagggttaaatgatattatagatggtctgaatgccgaatagttaggggttggagttgggtgacaacatcacgtttgccttttgctttaacaaaagaaaagaatttttacgaagaattgaacaattggattggtgacgtgttttacgatatccttcccgagaaaggctttgaccttcgggatgagcaggtatttatggcgtttcagcttgaacgggcatttaaagagaaaaaggtcatgttcgctgaggcaggagtcggtacggggaaaacgctggtgtatctgctgtttgccatcagctatgcaagatatacgggtaaaccggccattatcgcatgcgccgatgaaacgttaattgaacagcttgtcaaaaaagaaggcgacatttccaagctgacagaacatttggatctgcagattgatacacggctgtccaaatcccatgagcagtatctctgtctgaaaaagctggagaaaacgatgcagcgttctgatgatgaaaagtggctggatctttatgagtcgctgccttcattcgtacacgaatcacaagcgatgcagcgcttttatccgtacggcgaccgcaaacagtacgctgatttgacaaatgaagagtgggcaggcgtcagctatgattccttccaagattgtttaacatgtgatatgagacatagatgcggtttaacactttcaagagatcattacagaaaatcaacggatctgattgtttgctcccatgatttctacatggagcatgtatggacggaagaatcacgcaaaagggaagggcagctgccgcttttgccggatcacagcgccgtcgtgtttgatgaaggacatctgctggaattcgccgcgcaaaaagcgttaacgtatcgtgtgaagcagtcgacgcttgagctgtttttagagcgtctgcttcaaaatgacatcagagaggaattcgccgaactgattgaagatgcccttgccgcaaacgatgagtttttctatgtgctgtcagaggaatcgaaggaaatcgccggctctcaccgattggacatccaaaacgaccagcgtgttaagcgtgcggctgacgaactgtgccgtctgctcgataaaatcggcgaggcgctcgtatttgaatcggaaatgtatacgattgataagtacgagctgtcagttgtagaagaatacgtcgaacaaatggcatattcgctgtcgctgtatcaaaaggatgccatcagctggcttgaaacgcgggatacagactcaacgtttgtcgttatgccgagaactgtagccgaagttttgggagaaaaggtcttttctaaaaagataccttatatcttctcatcggccactctttctgagggcggttcatttgattatatcgctgacagtctcggaatccgtgatcctttatcatttaccgttgaatctccgtacgattacgaggagcaaatgtctgttgcgcttcacggtgacatgacgtctgagcagaaaacagtcgaaacgattgaaaccattaaggagaatgaaggacgcaccctcgttcttttcccttcctttgaagacatgaaggaatttaaagaacaggctgccgcgtgggagctgccgtatccgatttactacgaaggtgacgaagagatcagcagtctggtcgaaaaattccagcgggatgaagaatccgtgctttgttccgtccacttatgggaaggtcttgacattcccggtgactcgctccggaatgtgaccatttgggcattgccgtatccgcctcatgatcctgtgtttaccgcaaagcggaacggagcgaaaaaagatccgtttgaggaagttgatctgccgtacatgcttttgagagtccggcagggaatcggccgcctcatccgttctaatcaggacagcggaaccatatccatttatgcgggcggagaaagtgaacgggtcctggccgaagtcaaaaaggtcttgcctgttacaccgaaaatcgtataaaaacaagagctgcaggaatcttatcctgcggctttttttaatccgggaagttgactttataacggcgttccattagcctgtaattgatagtgaaaagggaggggaacggatatggatgtacatacatatgaaaaagagttttttaatctgttaaaaagagtatcccactatgaagaagctattgcgctcatgcattgggacttaagaacgggagccccgaaaaaaggctctgatgaccgggcggaaagcatcggacagctgtcggctgacgtttttcaaatccagacatccgaccggatgaaagagctgatcgacatccttctcgtgcatgcagaagagctctctgaagatacagtgaaagcggcggaacttgcgaaaaaagattatgatcataataaaaaaattcctgaagatgagtataaagaatatgtcattttaacatcgaaagcggaaacggcttgggaggatgcaaaggcggcctctgatttctctatgtttgctccgtaccttgagaagctgattgattttaataagcggtttatttcttactggggctatgaagatcatccatacaacgcattgctcgatattttcgaaccgggtgttacggtaaaggtgctggatcagctgttttctgaattgaaggaagcgatcattccgcttatcaaaaaagtgacggaatccggcaataaaccggacacttcctttataacgaaaacgtttccgaaagaacaacaaagagacctctccttgtatttcttaaaagagttcgggtatgattttgacggcggccgcctggacgagacggtgcatccgtttgcgacgacaatcaaccgcggcgatgtgcgggtgacgaccagatatgacgaaaacgatttccgcacggcgattttcggaacgattcatgaatgcgggcatgcgatctacgagcagaatattgacgaagcgctgagcggaacgaacttatctgacggtgcatccatgggaattcatgaatcccaatcgttattttatgaaaactttatcgccagaaatcaacatttctggaccgcctattatgaaaaaatggttgaggcttcgcctgatcaatttcaagatgtgaaaagagaggactttgtacgcgccgtaaatgaggcgaaaccgacctttatccgaattgaagccgatgagctgacatatccgcttcatattattatccgttatgaaattgaaaaagcgattttcagcaatgaagtgacagtggaagaactgcctgcattgtggaatcaaaaatatcatgattatttaggcattacgccgccatctgacgcaaaaggcattttgcaggacgtacattgggcgggcggcgatttcggctatttcccttcctatgcgctcggatatatgtatgcggcacagctgaagcataccatgcttgaggatctgcctgaatttgatcaattaatagaacggggcgactttgagccgatcaaacaatggctgacagaaaaggttcatcagcacggaagacgcaaaatgccgcttgacatcataaaagatgcaacgggagaagaattaaacgttcaatatctcattgagtatctcgtcggcaaatattcaaatttatatttataaacgaaacgcccggcatacaccgggtgtttttctaaaaattctaaaaagacgaataatcgaaaactaattctttgtaaaagttcggaaatattcaaatttcactatgcaaaagaagtgtatcttgttataatttgattaatatcatacgaacactcatataatcgcgtggatatggcacgcaagtttctaccggtcaccgtaaatgtccgactatgagtgagcaatggaacggctttattcggccgttacgtgtagatcattcggcattgcttgctctttttttggagagcgggcaatgctttttttattttttataagcgggggtaatcattgtggaagcattaaaacgaaaaatagcagaagacggaatcgttctttctgatcaagtgctgaaagtggattcttttttaaaccatcaaattgatccggttctcatgcagcagatcggccgggaatttgcgcggcgttttgaaaaagacgagataaccaaaatcgtcacaattgaatcttcgggcattgcccctgcggtaatggccggccttgaactcggcgttcccgtcatctttgcgagaaaaaggaagtctctcacgttaacggatgatctgctgacggcgtccgtctattctttcacgaaaaaaacagaaagtcagattgcaatctccggaaatcatctctcgaaagaagaccgcgtgttaatcattgacgactttttagcgaacggacaggcggcagaggggcttttgtccatcgtaaaacaagcaggcgcagcggtttgcgggatcggaatcgtcattgaaaagtcatttcagccgggaagagacgagctggtaaaaaaaggattccgggtcgaatcactggcgagaattcaatcgcttgaagacggaaaagtgacatttgtacaggaggtccgttcatgaaaaacggctatgccaaaacactttccctcggtatccagcatgtgcttgccatgtatgccggcgccgtcgtcgttcctttaattgtaggagcggcactgggactgaacgcagaacagctgacatatctcgtatcaattgacatttttatgtgcggggcggctacgctgcttcaagtatggaggaataaatgtttcggcatcggcttgcctgttgtgctcggctgtacgttcaccgcggtagcgccgattatttccatcggtaaggagtacgggatttcagccatttacggaagcattttggcatcgggtctgcttgtcattctgctgtcatttttcttcggcaagctcgtatccttttttccgcctgtcgtaaccggatctgtcgtaagaattattgattgagtacgacataaacctagttatagtagaccttgatattcaaattcttcgtaccatctcccaaatcctcgaccgtatacgttacatgactaatgagcatctttagtattaagtttatttcagagttagacatcccctcagtagactcaatcatctcctgcactttatgatgactccatttttctttttttgtctcagcgctaagagcattttgaaactcagtagatgcaattaattctgctaaatcattttcagctttttgaagtgtctcttgtgaaattttcagcttttctttgtactctgttttactgatgtccccatctaagtacatttcctttatgcgttctattcttccctttgcctttttaacagctttttctcttaaaccaataagctgagttgtataagagtcatcattaacatcttgctcagtaggggagaagagagcttcattgtatttttttatttccttcataattgactggaacaatacttcttcatgaattccttttgtttcttcgcattcttttgttctttcagcagattttcgtaaacactttctaacgtgttttcttctgcctttgggttgttctatagcttgtgctttatgacaataaggacatctaacaataccagaaagcctgtgggtattcatatttaaacgtcttccagccactttatatgttctaagtttttctattctattcaggattagggcatgttcttcatcggttttcatggtttcatgatgaccttttgcaattaatacttcatctagatttttattttgaacaatactgttgttgcttttgcttttcttgtatttaccaaaccatacataacccctatgaaaatcgttggacagaatttctgaaacaacttctccgtaccaaatggaacggccggatggggaagggactttcagttcgtttaacatctcagcaattactgtgcaagaatattcctcttctaagaaccatttaatcatcattctatatatttttttcttttcctcaacaactactgcagctttgagattcttgtcccacttataaccgtatggaacagaccctgaatgcagtctgccttctcttgtggcatttttctttccgttaatcgttcttcgttttattgctctatattcacttcgagcaattattgattcaaactcagaaagcatttcgtcgccttcaattgataaatcataggttttttttggtgtaataaacaatgttccactctgcttaaatgcttcaagtatacgtcctgaatcaatttgtgaccccctagagagcctgtccattgctacagcacaaactgcatcaaactcaccattttcgattcttggcaataataatgagaacattggtcgctcatcaatagtctcacctgaaacaacttcttcaaaccactgaacatttttaaagttctctctttttatgagatattctagctcatttctatgtttggcgagtgtatcttctgaatctctgtcttctctggattttcttgaataaactgctattcttgaattttcgtgtaacgccaagtatttcatcctttcttcttattgtaagtgtagttagattatatcatgtgcattggaatttctttataaaatcctcattttaacgaaacattttagatcagcttgcttattaatctaatttaaagtatcctaattgatgtatcataggggtttaacagccactatagaccacagagtccctcacagagctctgtggtttttatttagatagaatatacccaaataaaaaaagaagcctcagagggcttccgatggattaattcttctcacatgcaaagttgtcattatcgcgatccatcttagatgtataagcagggtgagtgcttggtacgccatgcgggtatttctttctcagctctgtgcagtttgcaaagtgttctgttcctccagcagaaggggaggcttgtgcagagttagaagagctgcttgatgctgaactgcttgaatttgaattgctagggttcgatttatgtgtctcggattggtgtgttgtaactgacttttgaaccggcttagatacacttactgatttcttcggtttcgttgcgcagccattaaatcctttatcagtcgcatatccattcttactccaaatcttcaagtctttatctttcgcagcttgctcatctttcttatacgtgtctaaatacttcgtgtttggctcatatacataagctactcgtgctaatccttctttaagcagtgtttcttgtactgatttgccatctgcgtaaacgtaagccaacattctgccatacttatctgtgcgatctcctttatcaaactccagttgaagcttgccctcgttaactagctgtttatttcttgctgaagcatcctcaccatatggttgtacgcaagagtttggtttcttagtttcaggagtgtcaacaagcaaataacgaactgttttgacttcgcctttatagttaactttaatcgtgtctccatcaaccgttctgttaagtgttacatcgactagctttttcttattgtcagatgtctttttatccgacgaatccttctttgaagcattttcggctttttcattcttgtcattattgcttttgtcgtttgattgagagtctgtctttgtctcttttgtatccttttcttcttgttgcgttgttttagccttatctgaatctgttttatctgtagaagcagaatcagacccacatgcagccaaagaaaagcttagagataatgcgccaatacctaacaaccatttcttcaatgtaattcccccaaatttgtttgttctgtctctatatcggacaaaccttcctaattataaatataaaaccaaagattgtaaatttgattttgtcattttaaaacactcaaataaagttgtgtggtaaaatttagtggtctaaaccttagaggagggaaagttatatggaagaagggaagttaattcaaatgactcttaatggaataaaggaagctgtttctaaatacggaacattccctatgtttcatcatggagggtatgtcatggaagatgctacttttcatttcaaagatcctgctagtcctcaagaaattagcgatatagaacagaagctaggtgttaccttccctaatgactataaagagtttttgttacagcacaatgggatggaaatgtttgatgggattgaaatacttagcttagagggaatcattgaatataatgaggttcaagatttcccagagggatacgttttaattggatatcattttgatggaagatatgtcatagacacaaacaaatcaaaaaatggattaggttatatgctatatctagactcaattgatgatattgaagatgcgattaacttagattcgaattttgaaatatggtttgatatgttagtttcttccaatggaacgaaatattgggaagtgaatccgaatatccgagagtattataaactggtttcagaataaaaagactccgcataggagtcttcatctacgttcatctacaattttacttcttttttgtataagaagcccaccatggatttacttctttcctgtgaaaattcacatcgataggaattaaattgcttgtctgatttcctccaccgtactctctaggtagttgatgatgaatctcaaatttcacccaagtttttttgccgtattttttatcataccatttcctatatgctttgcgttctgtagttccccattttactcttttatcgctaggcacccatttaataaatgcattaggtggagctaatatatttaatcctgattgcttatctgtgtaattggaggggaaaaacattcccttcatattcgttaggtataatccttcagtccaggatatcgttctaacagttggttttttccctgcccaagtagcaattgcgccgccagtatacttccaaaatgttgttttgtttacattaataaattgatgaacttccgatccctttttcacttgaggccctacaaaggtctttctaatagtatgggggcaagtaaactgtttattataataaccacttttgcataaaccctggtgtacttctgctgacgcaggaggaatccctactatttttgaaatttcaactccgtgcatcactttattaacttttccacctaaaaaagtgtgactgaaatagataatactttttgcttttttctcaacagttttccgttggttttcagaggtgacttgtccagatgatgtctgattaccatctttgtcataagctatataagtctgatatgaactttcaacatccattccttgttccttagcaattttttgcaacttactttctgatccagctaattctcttttagaggaatcggtgttttgcggtttttcgtttactgttgagatacgtttgtttaggtcaatgccagttgcattattatcagtgatttctttgtttgccgttgcctttacatcatggaggggatagcaagagaataataaagagagagctattacaactaaccaaatgctttttgacacatacttcataatggtttacactcctttttcttctgtttaaacctgctatgagtatctaagatgtaaataaataatatattttacaattaatacctccttccgcgaggatagtatcaccttttccattttttatcaactgaattaagcctattttaagattttgttaaagttcaaatctcctaagaaagagaccttcgacaaaaggaagaagctctccttacatgtaattttatgtggtaaaatttagataagattgagtgggaaggagacagatatgaaggtatttgaagcatcctcgttaatctcagcagcggaaaagcgagcaaaagaatacgatcagattagagaacaatttatcaatctcagaaaagcatttcaaggaatggctgatttagatgacagcgagttttcaggtaaaggtgctgataacattaaagcattcttccaagatcacgctggtgttacagacagctggcttgatctgatcgatatgaagattgcttttcttaacagtatttcaggaaaagtagctgatgccggattagccgattcgtttgtggaagagtcatttttagagcatgagttgattcatgcgaagaataagtcaaaagccatcatgcaagagcaacggaatgaaatgagggatattcttaatgagataagtgatattgttcatcttgatgttttctctacagaggatgtcgatcaaaagctggattcagcagataagaaacgggacaataccatacacaagctcggaaagctcgatcatgatctaacgaaggaatatgcagaaaccgaagcgaacgagcatttcatccaagccgactttcaacagcttcaaaatgccacgggtaaagggaaaaacgcaacaccacttcactataacgccaaggcgtacagagaaagtgacatacataagaaaaaaggcgagattgcaagacattcggatgcttatttgacgattaaaaaggaagaagcgaaagagcgggaaatcaaggatctgaagaaaaagctcgctgacggtgtgaccgatccggatgaatatttagaaatcgcgaagaagatcggctatgaaaaccttgaaccttcccaacaacaatatgtgatgcagcttgaacaagcaaaacagatggaagaagccggagaagtgacttgggatattttaaaaggagccggcgttggtttatatgatgtcgggaaagacacggtaacaggtttatggcagctgatcagcaagcctgatgaagttgttgaaggtatcataggggcagttgctcatccgattaacacgtataattccatttcaacagctattgaggaatcgtatcaaaaagatatggtaaatggagatgcttactccagatcaagatgggtgacatatgcgataggtacggtagttacctctgtagtaggcacaaagggagccggttctcttacaaaagctgacgtagcaggaaaagtcacctctaaagtcagtaaagcaggccaaaaactgaaagatgtctcaattgctgatttattgccttataatccacgttacgatgttgttccggctggaggagttccttataatgtagttaacggtgagaatttaaaggatcgtctgcttcagttaataaagtccgccaatcctagaacaaggttgcctagaaatcatgggagatgggaagggactcctggtaacggtaaatggcactcagatagacctgacgttaatgcagttactaaaggagaacccgtcacttttatagatggcagaccggtttttacaccatggagcaaagggacgattaagtttaaatcaggagaactgaaaggtactaaaaaggattttccagcagtttataaacgtattcaaaaaatgaaaggctttaaaacccaaaaagaagctgaaaaatggctgaaagaagtagttagattaacaccgcatcatttagacaataacaccatccaattaatccctatggatttacatggtaatatacctcacgtaggttcggcatctgatttaagaggaggattttaatgggtatacaggcaatcaagaaaaaaatgagtgaattttatttagatataagacttgataagaacataaattctcatcaagtccttaaaaagtttgaggacgaaaattctttcgacataacagatgaatataaagagtttctcaatttatacggggaatgctggatagaggaagataatgtgtttttccctgttttagaggacaatccactagcagataacggtaatctccggttgggatatttctacggtcttaataacaatgatgctaatattatcaaattaaaagaggatctttcagaacaaatgccggactggattataccgattgctgatggtgacggaggagatcaaatttgtcttggtgtgaaaggagaagcaacaggaaaagtttatttttgggatcatgaattgacaaatggaataaaagacacatttttggtcgcaaattctttctctgacttcattcaaagtctgtttattgaagagacaacagatgaagacgatggtattttatctattgagctagatgatgatttattaaacagttaagcaaaagtattgcaattgcatgatgtagcagcataagtgtccttaggcaaagtgaaagtggtttaatccataaagcaatagtattgcaaataccatttttatgtggttataattagtgtagatgatacagttatataattattttttgcatttgatttgtggaaatgcataaaataaaaagaccagggtgttggtagcaccccggctctgtacaaaaagctgcccatcaaagggcttgctcagcagttgttcatgataggcctaacccttcaggtttccaggctcaagggaggtctattttttatttatatacgtcaacagggcgattataaacgacccgaatgcaagcattaacattaatgcctgaaatgttgacataagcatcaccccctttcgtaggggatgagcaagactcccttgagtgagcatgctttaatgtacaggaatcattatacactaattccaaatatatgtctgtgattattggagccttattgacaatagacaagttataatgtagtacttttctttttgaaatttgtgttataagatatattaagattttcaacaagagaggaaatttatcatgaagaaagaaattttgctaattcataatggctcaagcattacatatgcagacccacatgaagctgctaggagttatgctaaagctgtcattgatggggtaaatcctaatgaaatagaactatatactgacattgccgtaaatcttaaagaccaagctaaactgatgaaacaatttaaccaggaactatctaagattgtaaatacaagaattcctatgatggaagaaaacacaaaagagctaagcaatgaaatggaaaattcacatcaaatttataagggaatttcaaaagaaagcataaaaagaaaaaggattagaaaaacgaaaataagcaggctataaaaatagcccgtcatttgcgtgatcagaaagaaaagcaatactttgtgccggagtttttaagtgtgaaaataaattactatgtccccccttacaagcatacattgtgatatgtaaggggggatttttcttgcctagataccggagcgctcttcgcaagagagggcctttgccttttcggtatgtgttgcttctgtcgtttgctttttttatcatatcgacggtcatcagcctctggatgatcaactcctcaatcaaaccggtgctgatgaacataggagaaatggaaaccaaacgggtggcgacagaggtcattacggaatccattgaagaatacatgtctcacagcgacaatgtgaaagatatggtcgatatgaaaacggatgaaaacggaaaagtcacaacgatggattttaatacacaaatggtcaacagtatgaaggcgaaagtgacaaagcagcttcaggctcatttgaaggaagcggagtcgaacaataagcagcatgaaacggaaaaaggcgcgaaaacggccgatgaaattatgattaacatccctttagggcaggtcacgggaaacagcattctcggaaatctggggccgaaaatccccgtgcgctttaacctgatcggtgatgcgttaactgatgtgaaaacaaaaataaagccgtacggcattaacaatgccctgatcgatatcagtatttttgtggaaattaaagtgaaggtcattattccgtttgccagtaaaacatcagtcgtgacaaataatattccggtctccattaaagcgattcaaggagaggtgccgcagttttataacggaagcggcggatcaggtgtgacgccttccatccagctgccgaatgaaaaaaaggagaaagacaaataaagacacacagccgcattttcttctggcggctgtttttactttttcctgcggatttcttgaaactgaactcaagtatcgactagagcagcccataaagcttagtggatacttgctgaatagtcatttccaacaattacatcgaactattgttcttatttatattgaataaagaacatttgttctgttaatattagatcaataaaggagtgattcaaaatgcttagagatcgaggggcgatcaaatggacttccatgatgcttccagaacatttaacgcaattaaaacaggacttgttagatgtttcgaaaatggagaagccatctttagatgagcaacaaattgaggagattgacatcctggtttctgaagcaatggcgttgaataaagaactaaagtttaagctctttaaagaaggggttgctgaggatttaatcggtacagttcaatatctcaattacgaacaacacaaattacacgtaaaagatcatcatgatcaaaccgtatacatcaccatgaatgacatcataggagttgcttacaatgattgattactcacagtttccacgtaaaaatatactttgtgtagatatgaaatccttttatgcttcggtttcagctgtaacaatgggattgaatccaatgacatgttatctcgctgtagtcggaaacacggatagacagggaagtgttgtcttagcagcgtctcctgcacttaaaaaagattatggaatcaagactggctcccggttatttgagattccagatgatccaaaaattcatatagtaaacccgcaaatgaaacttttcatcagagtttcaactgaaatcactaaattgttttacaggttcgttcctgaaacatgtgtgcacacgtactcaattgatgaatcttttttagatgcaggaaaagaaaatcctgaagtcatggcagaagcaattcagagcagtatgaagagagagtttggcttagtttgtactgttggtattggtgacaatatgttgctgagtaagttagctcttgatttagagagtaagaaaacaaagactgggattgcacggtggagatatgaagatgttccaaataagctttggtgtgttcatccgttatctgaaatgtggggaataggagggaggatggagaggaatttaaaccggatggggatttcaactgttggtcaattagctaaatatccattagagctacttgaaaaacgattcggcattatgggcaatcagctttattatcatgcacatggaattgacctttctgaaattggagctcctttgatgcaagggcaaataagctacgggaaaagtcagatattacttagagactatacgaagaaagaggatatcaaggcggttctcttggagatttgtgaagaggttgcacgaagagcacgaacacataacaaagtagggcgcacaattagcttgggtattggttacagtaaagatgagttcagcggcggctttcacagagctaaaacgattgatttgcctacaaatatcacaatggatatttatcgatattgcttgatgttgtttgataaattctatacaggcaaaacggtacgaagtgtttcagttaccttatccaatattgaggatgatgtaaatcaacaattaagtctgtttgaaaaagataatgagaagagaagaaagcttggattcgttatggacgggataagaaacaaatacggatctaaagcgatcttacgagctgtttcttatacacctggaggcacagctttgcatagagcaggtttgacgggtggacataaatcatgagaacagagagcagctccctctgttctccttacaaagtcattagttttttacgtttcggctctttcagcaaccttgaacgtatcattttgttgttggagataggaagcacccactgttccggcaacgccgaataatagaactgcacagataaatagtttagttttcatattgcttctccccttttgatttgtcttcttgcttcatttgccaaacgataaaattcaactgcaccccaagcatcctgttttccagtgagaaaatctgctacagagacaccatagctttccatgtcagggtatatacttctttctttgaagaactcgaatgttttcctaactaagtctaaatcatagtccaagaaaagtcctttaaccatttttaacttttcaagtaccatttcattgttatgccgttcagccaactgtttggcctgttcataaaatttttttgcgttttcaatgtcattttgccttccctttaagaaggagataacaaataatgttttagcagcgtaatcatgattttccggctcaatgatttgaagtgacttattaaagtgaaaaaatgctttatcaagttcttccatttgattataacataatccaatattaaacagtgctgaacgcatcaaatgcccacgattcttttcacttttgtttagctctactgcttcctgatacgctttgtatgcttgctttaaagcttcatcaaacttcatactgtccaataaattaccaaatatgacgaattgacagcgtaccttttgtaccccgtatgtagggctcccgtcaatagcaggttgctttttaaatatatcgtaagccctcatggcataattcattgaaaaataagtctgtttcatgtggtaatacacttctgacaatttaaaataaaattcagctttttcaacttcaatatcttcgctctcaattgaatccaaatatctctcagcttgtctatagtgattaagggagaatgccaactccttttgtctaaaatagaacatgcccatgaaaaaataatagtaatattcgagcattccagttaagttttcatggccttcgtatgcttttaactcaccatagtttttctcaatgtcttttatagcgttaggatacatatatgccaacattagcttatgtctaaactcaagtagggagtagtatagtaaaacatcttggttttcttccataatttttatttcctgcataacttctttacgcatttcttctgctctaccgacccaattctttttaatagccacataccaatgattcatctttgttgctactaaatcataaggaatgaccttttcgttctccaagtcctaaacccctttcaaatccattttattatatagttgcattggaggaaagaaatgtaaagggaatttgagtgaaaattaaaaacaaatcaataattcgattatgaacgaaacgaaaaaaataccctcctcgttagagaagggtatatgatcagtttgctgttgcttttagagaagcaagccactcatctaatgttccagtgaagccttgttgaacggctaattcatatgctgattttccatctttaccggcagcaccagtagctcctttagcaccggttgcaccagtatcacctttgtctcccttagcgccagtagctccagtgttgcctttttcaccttttagtgaagctaaccattcctctacagttcctgaaaaaccattgtccactgcgatttcataagcagacttcccagtgacaattgagacattaaccattggattgaaaaaactcatttatgcgcccccaaaaagttatatgtaattcctgactcagaaattttgaagcttgtgataggtgaatcgtgagcgtccatttgaaagccttgtccagcccttaaatagataggatctccaccattgattgatacgtggcatttctgatcattcgaaaagctgaacttatagaaagaatatttaatcgtccaggttgcaggtggggaggggattacttcatggttagattctgacttctcaagcattggacttccgatatatccagatcctatttgcataatcaacaatcattcctttcttcttgaaaatgaaaaaaagggggagataaactccccaagttattttggctctgtgtattccatggcttgatcgctgtctgagatacctgtagtggttggatccactacaacccccattgcagttagaaatgtaagcaaagcattaaatttctcagtaagatcatcgctaaacacagaaatgtcgtatccaaatgcagatgcaattgcttgtgcaaacaaaagagttgcagagaagattgcaaccaggaatgttttctttttaagtcttactttccagttaattttagtcattaaatcgtctccttataaattagctaatttggtgatatcaacaccagcgatctctgcaccaagcagtaagagaataattagaactaaaatctttaatgtcttgccgaatgttccttctaataagttttgaagccattttgtttgcgactgattaacttgctgaaactcatttcttagtccagctatctcagtggtgaacaaattttttgtttcaacaaggtttttttcctgattctcaacaacagtggtaagcctaatgagcgattcacttgttgttttttgtgtttccaacatgatttttctatcttctgcttgttctttaagacgttcttttatatgagcgacctcggtctttaaaacttcatagttttctttttcagccacaatgcaatcatcctccataaaaaataggaggtaatgtcacatcacctcctaaataatcattgatacactttgagctacaatcattctcaaagatatttaaatatatttagatttttgagccaaattgtcctgagatgtagcctcgtttacctttgtagataacttcccagtaacccttagcattgtttaaccctttcactgagccagaaatgctgacggtatcacctagctccacagtgccgagattcttcgctttgtttttatcaggtctgtccattacgatagcagcgctttttactccgacaactttaatcttgcctacagatttgattccactgctatcaggcttagaagtgggtttaggctttggggttgattttccaagctcagcatcacttttaatgtatttcacatttacatatccgctgtatgtagcgcctttggagtttgtatatttgatataaccccaaccattttgagttgatcctttttggtattggacagtggagcctttaggaagggcaagtacaatagaggagttcgcattgcgctgagttctcacattaagactgtctgcgataactgtgttcttaacataagagccatttgttttaacgacttttgttggctttgaagatgaggaagaagttttcccgccgagtgctttcaattcagcagcaatagaagctttaacagcattccaacgtccttcatcaagaactcgatgtgggcaatacttgccagaccagtcttgatgctttttaactcgatctatgccccagccacgttctttaaggagttgtgcaataaacttaatagccaacgcttcagcttttttatagcgctctccgcctgatttagagtagcaaacttctacaccgatggaagtccggtttcctgaattcacacctgatccatcacccgtatgccatgcattacgatttgtaggaatcccttggacaacctctttatcatctacagcaaagtgaaaagaaacttcattattgttaccgatcatataactaacttcattttgcgctggtgcgtcgttgtatgtattgtgaaaagtgatgaatgaagcagataatgcatatggacatttgattgaatatttgtctggtgatactaacatttgtctcgcttgaatagccatattaaacatctctcctaaattaaatttgagcacaaaaaagagagaaggggacaaatccctatctctctttatctcacgtatgctcttgttatctctgtttttgaatgccgtaaattgaataaaatttatattttaactagaacataaccacctcctttaattttaagggttacttaattaagcagatggcaatgccgtaaccgagcttgtctgaatatggagttacaatctccatagccttccaagagtaaaacctgtcttctgattttgtgccgattccataattaccttcaattcgatctcccacagaaacagtactgtccactttcacataaacctgtccaagcaatcctactatattccattcaggacgttcttcacgagggacgtaatctattttttcaatccactcagggtttactttaggcagcttcttaacatcaccggtttctgggttgaccacatcttcatatatgtatccaccaaactcattctttaaatatctaccttgccagtgaatatcagctcctcctagaatagttcctgcagtttcagagattactccgtgtacatcttcaccttttctcgccgggcgaattttagctccttcaagagtgacaattgtccctgtcggaattgcttttccgtcaagactttcaaaatactcagcgtaatcactaaaggtggctccgccattcatctttcctgccgatgttatatccccattcatggagtttagcatccatttaatatttgctctggacggagtagcgccatatccgccaaccaccatatagcgatcattttcaccaagttttacacctccagaagcgtggatttcacgtgatacattttgcccctcgatatgagaatcattggagttgtaaacaccgctacgagatccatctacagagcttccgcctgatgagccgaaaacgttggttcttgttccctttgcaacgcatcctccggtagtagctccaactaaagtggcatctccaagtgcttgaggttcacccgatgaagctaatactgcactagtatttgttttagcatagccagaagtcgtagccccacgtagaccgcccttgaaattattcgggataaacgtgtaggtttttccggcaattttactgggagtagcgtattgttcacacatcgcagcgctaatattagcttgtgaattcgtgcagtaaacacctatcgaacctgctttgtttgatcccgtcatgttaacgttattgatattgactgagccaactttacttcccacagcaataccaactaaagcagattggttaatggttacattcgagatgtttacattatctgatttttgagctccaccgattacatagatatcgttactcgctgttgtaaatcccgaaacagtgatgttgcttaggttgatatttttgcttttatattgggtggtgatgattgcagtgtttttataatcataggttggatcaccaattgcgttgaagttcgaaacgttgacatttctataagcggaaatgactagtgcgcgaggatttaaaccttgataaaggtcactgaaaataggatgttgtgcagtgcagttaacgacattaatgtcaaatgcacttgtggagattttttcggaggctaggtggaagccaatatgtctaaagtcgaaagcgcggatatcattttcggaatagcagtttattaagtttacgtttcttgctgcaggtgctctattgtgagctttgacttcaaaacccctgcaattttttcggctgtaacagttcacaagccatacgtttttagagccatcatcaatttcaaaaccgtttgaatttgaagctcctttgctgtgtgcggatccattagcgtcataggcgtaacagttagtgaagaagatgtagtctgaatagtgagttgtgaagccatcatcaccatagttagttgcagtacaattttcaatccaaacatatttgctaccatttggctgataatgatctgctccatcagaagaagagttccaaacaggggagcttacatcaaaaccgtgtacacctggattacgagcattgacgtttctaacccgaacaaatttagagttaacaatccccacacagtttgcatttgttccatttgtaatggtgttgtcctttttgtctaaattccaatcgaggtctaagtcttcaattaagatatattcgtttccgtttgtgtagtcgctattggttaacacacaagatgttccggtagcagttgggtgaagcttgataatagatcctgatccaacaccgtaaagtctgacataagaagggatatgtaatccttgaaccatataaatacctgcgggtacaaaaacttctcgcttcccgctggcaaaggcagctttgaaagcttcagtgtcatcagtaacaccatcacccttagctccaaaatcctgaacattgacacttcgtctgataaactcatttaagactttatcaacaattgttgcaccagctgcagggatttttgaaatgtctccaatagtgtttgtgatatctgttaaaccagaatcgactgtgcttattacgtttttaatatccttagaagctttatcaaaagcctcttgaatatcgtctgcagtatatctaatattatttgattttaaccctatggcatcaatgggtatccattgctctgtttcttcgtccttatagcccattgtgtttacgggaattaaattgtcgctcaatatatactcctccttatccttttctaatccaaaccatgcttccgtcagggggttctacagatggttttatcctcatctttttgggagcattgttcgttctcaaccatactgatctgatgttgtaaggctctacatagctagaaacaatgttgaaaccatcatacttatctgacacgctaatatttatccagtcgaaaccatcccatcgatattcaatgcctgtttcttttacagtgacagtccaaccaatttgaggggaaggataagtgttcaataaatcctgataggtgtacacaaacggcaagtaaatcttcctagtattctcaactacatactcataatctgatgttgcttgtctgcaccaatttgttatttcaatacagcgcttggtgacacgttcacattcagcaatacgttcattgatacgaataatggcatcttcagcatcatcaattaagccttgaagcgtttcaatgaccatatttccttgtcgtttaatccaaattcttgaggcagggaagaaggatgcgccttctccttgatatgcaaaagtaagtgatttgccttcatttgaaccattgaaaaagacaactcccataaggtaatcaaccttaaagtagttgtcttctaattcaccatcttcaatttctcgccattctttactgtcaccactaacctcgactctgtactcacggttaggtacttctgtaagtaagactcgaccattgtaaacagttaaagtttcactatagcttaaataagggtcatcgattgaacccttccttttttgagaaagggtagggtcgttatagagctgaggaaaatccaaactaaattcaccgtcctttcttattgtgtaattgatttgagcaattcttctaagtgcgcgactctctcttctaaactctgcagtctgcccttagtaccacctaatgtttgtcctctaataatggattcagctttcttgtcaattacgttgtaaacagacttctcatctgaaattgcatatacagaatatccttgccaccaatcttgagcttgaaaaactctaacccatgcttcaaaccaattcgcctgaattgattcattgtattcccctaggtcaccgaatgcgttatggggctgttcaggagagttactgtaaggtgggatgccaagttcaccaaagaagatcggcttattccatttatcataaaatgctttgatttccttgaatatattttgtccgcgtccgtataacggtacgctataaatagcatcaattagctgatcgacagatggatttcgattatcagttaattcaaagtaagccgctattgcaataatatcgactagtccgaatagaggattattcagctttttgttgtaggcagcaatcgtttcgggagcccaatcagcggttacccaataatttgttcggtagagcatctttccactgaataaactcctaacgcttgtaataactgatttccacttttctgttgagtcttccatatgaactaggtttgaagcaatgtataaaccgtctaatttaaattgttcgcattttttagcgaagtcttgcaggatgttgttccatgctacgaaccattggtctagatcagaaggtgcccaatcggtttcagctatcgttccatttgcgatgaaggggtagggttctaaaataatgttgtacccgtcatttttgagtttagggatcatatcccacgcttcgttataagtgtaatccacaacagttggatttgagtctgaagcatccacagcattaataaggataggaatagtgattgtatttaagtttaaaacagttgagtcataactaacatcagcataatatttacgaccaaatgcagaaacatttccgcctttccatttcaggggattgaccaaaaggttattgagctcaatgttttggacacgactatcatagtcggagagtttagtgtcaacttgtgctgctgtggtttcaactaactcagcagttttctggtcactggaaacccatttttcgccgtcataagaggaaacaacaccggtaaccgtattagtccataaatcgtttgcttctggctcttcgggttcagttgaggagacagtgtatttcgagccattaagcttacctttgacttctacagtagaagaggggaggtaggggttttctgaggggaatttaggctgtacaatatcagatagtattcgaccactgctatcaatggacgtctctactgtgcgataggcttggactccaaatgtatagtgtttatttgaaacttgaccggttaatgttgcaattcgtttatcataactaactgataaatattgttcagctgacatctttgcaccaaaaagataggtatcatctgatgtgtcagagtagcaatggataagaaaaccatcgatattgtatttatcctcatcggagtctggaaaatcccattcaattgatacatctacagatccattatcatttacaacatgagttatagcagtcccgtcatttcggatagttgggtttgctacgggtgcagatatacgatcatttcgtgcattgtaattggtcagtagggtatcataatcaatctttttcttattgaattcagttgatgctttcttagcagtatacaatgagcgtgcaaagtcttgttctatcgtagtagctctttttccattcgagagtgttacttgtatactttgctgctcaaaatcaaaattcattcctgtaagtgttgctttgacatcagttctaaaatcgtcattaactaatctgattatatctcccaggtaaattctatcccaaaaatccttttctttgttgacagtgaataagttgacaatgtttgttctgatgtctaccggaggtgtatttttctccccaagttcctcaaggcctttttcatacagctctgtttcatcaaaaatgttgtcattagaccaatcatcttgacggataaaataagacaactttttcattagcttttcaccgagaaacttatccatagataaccgatcttttaacactgctatttcttcagttatcttggaaatctgattggcagtggtggatatttcagctttctttgatgtaacttcaagttgtttggcatctctttgcttgataaggtctttcgtgtcatctccagctttttttgctactgtgatcttatctaagatttgttgtaattcaattttttctagggtgaagagggtattctcctgtgttgtttttgttgcttccagatcttttttctgatttaaaaggaggtaaaaagaagagccttctttatttacaagttcattgtaatctaaaattgcatggcacaaatcatcatccatgtaatcactatgcttaattacatttctcttttcatcacgttcaaaagggtagaggaaataagagaaatcatccaagtaactttgtccagtaggattgactgaattaataacaattccatctttaccggtaatgtctaatcgtgttacaacttcatcaatatcaatggtatcttccatatcaatcatgaaccttttaggagagaattggacacctttatacttggacacagtttcttttttataaaatgatactgtgttgttcacagtatcaaatataggcacagcctcaaaagtttctccaatgttctttaaaaactcatatcgggtagaggtaacatcaaatgagcggcgtttttcattaaaagaggggtcaataaagtctacagtaaagcaagttcctttaagacaatctgtggcaacttccaacagatttttagagatgccttcatatgatttgattttgcttttatgaagaatgtagggaagtccttgagctctaacttgtattgtttgttcctcattttctgactttgtcaatccggttattacaaaccattcaactctgtttaagaactctgccttaatgagataccagccttttatgagttctgccacatggtttggcttcatcttgaaattatatcttgctttaagtgggatattaaaagttagatcgtggagttcatcaaaattcaaatttagagaggcgttagagaaatctactatattagcgattttctttttatttggttttgctaaagaaaccttgagatggcctggtttaaaatcgtaaatcaataaaacatccccttacaaatacttatatctgtatataaaccggatacaacattcgcccgttattttaactctgtttatcccccttgttaaaaaaacatactgttcattgacttgatcataacactcatacccagtaacactggaggtgatcagctctttattggcatctacattaataacttcttgatgtttaattgatgtgaattttagaggttctttataagctgtcaagttttcgactgtgatgtctccatcaccgatttttttgaattcaagagagagtgggatatctaaatcccctatatttttaatttctatattattagaacctgatgatatgtcataccaatgggtagttgtttctcgtccatacctataaggaaatactttcattgtcagcttcacatatccgtcattagagcagttgtgtaccaaatctgttgcattcactggcaaagcaaaataaatgatatctaaattactactgaatgaaagaggcttataatcatctacatttagccaacgtgcaactcttcgaatattttcttcatctaaatgatcttctatgtaaaagtttaaagggatttcatatggttcacgtttaacactgtctacatacggttcagaagctgatcgtgtatatgtttcatttactgttctattcgctacgaaggtctcttccaatagtccgccctctgtgtttacattcactgccccaatttcataagaggggatatcatcgaacatgaaatattgactttctctaatcataaaattccacccttaccaatcaaaaagcaagctgaagagcctgcattatacagactcttacatgcttccatttaattttataacttctttcttgatggtttcgagcattgttctggctccagtttccccaccagtaagtttatcaacattgaaaattattggtgtgttaattgttttatcaccattagaattaacggttgtggtagggggcaggttagcagtcttaacatttggtatcaaactattagataggctcgcttggttaatattcggaattattgatggaatagaagtaatccctttgttaatcaaagctgctaattttccaccttgcccccatttaggtgtttcattattcagatcgttatcagacagattgcgaacatactttacagtttcaagcatgttcttggtgtcagtcttattcagaataagctctttatcatgaagaatagcaagcttgccagcacctaaacctgttcctgtgtatcctcctgtttcaaatgaagatatttttttgcctgttgtattgcctttggtcacagtattaagggcattagaagcttctttaagcttatcgataaggttattagagatacttttaccaatggactccatattgctgttaatgaatttagagaattcattcagttgcttagcaatatcagtaatcttcccatccattagctttttctcaagttccttaaatccacgctcatcattgacgagatcatcatatttcttgttaattgaatcttcgtctttttgaagctgatcttgcaacgcttctttacgtttgctactttcacgatctttaagaaactcatctaaatctaactgttccttttgtaactgctcagttaattccttaacctttgacttaccaaattctgagtcatcaagagaatactgattaatttggtcagtgagtttttggatactctcttgcttctcttttaactgtctttgaaatttagcttcatcgtcagttttatcgatctcatcaatcaagtcttgtgttgctttttggtgcgcttttaattcaatatcacgcatcttttcgtacatctctttatagatggagacaacttcatcagcaagggatttgtacacatctttgattgatttctttgtgttgtaaagctccagattgtaatccttctgcttgtctttccagttctcgatttcttcagtaatttgtttctgaatatccgggaaccctttagcagctttcttttgtgcttccaactgttttatatacttcttcgcttcattctgttgctgctgaataagcttaatctgttggctataatatttaaccttgtctttatcttcctcggtcatggatattttgttgctaacatctttaagcttggattcagttttcttggttgatttctctataccgttaagcgtttcatcaactttggattggatgagctgtccctgaagttctcttacttcttcttggaaattgatgagatcaatcttagcttgttttaattcctcagcaagctgtgctctttgagcggcattcagagttttgtttgttttgatttctttttcaataaaagaaaccttctgactctgaatcttttgctgttcagttaaagcttttttctgatcgtttgtatacttacggaactctttactatcgctcagataatgactagcgagggctttgtctttagcgattcttacatcaaaatcaccaatgcgcttgtcatattcatcaagatgcgactgaacgatctcatattgaagctcttgtatctgatcgtttactgaattaatgtcaccttgaagggagaggaggtcggatttagcttgcgctattgcttgttgtcgttctgcttcagcttgagacgcatctgaaatagatgtaccgacaccttttaaatacttctcagggtcaattgtctttccgttttcctcaatttgaagatgaaggtgatttccagttgaattacccgtactgccaactttaccgatggtctggccagctttaacagtttgaccggctttaacagaaggggtatcaagcatatgcatatacttagcaacttttccatcatcctgctgaatgacaacccagttaccggcagttttactataaccagcaatttggactttaccactttgcaaagacttaattgcagtaccggcttttgcggcaaagtctgtccctttatgtggagttgatcggtaagcgccatcttgagcaccatacttagaacttattctaaacgcgctgttcttcgtgtagtagcttgcaatggaggaattggcagaagtcattgacttcgtgtaatttgacatgatcttctgaacataattctgtgtttctttgaagggagggacgccgccatatttaattacattaccaggccctgcgttataagcagcaagtgctttctcaacattgccaccaaatttgcttagttgttgggctagatatttcgtgccacccataatgctctgataaggatcataaacattgtttacgcctaagcttttagcagtggaaggcatcaactgcatcaaaccagcagctccggctccagagcgagctcttgcattgaatcctgattcttgttggattacagctgcaattagagctggatcaacaccgtatttgcttgcggcagaattaatgtagctggagtatttaccggagtaagacccaccaccagaagaaaaagaaccaccagaagatgaaccagaggaaagggaagaggtaactataccgtattgtgcaatgttccctgacttaatttgatccttgaggagtttggcttgctcctgcataagctttttcttttgttgaagagctttaatttctttctgcagggcatttcgataactttgggaatactttggatagtcgtttacttgcttattgtacttttcgatttcagcattaactttctccagagcttccttgtatttatcagccacgtacatggacgttttggtttcttcatttgctttctcttgctcgtctgtccatttttcaagggaagtacctgattctattaacgcttgtttgtttgtttcctgagtagatgtagcttcttcagatgctgagatgtaggatttaagagcagctctaacgctatccattgcagagatttggctgttagaaaatccaccaggttgcaacattttttcttcaatcttatgtaattctttcttcgcatcagctacattattgattgatttaacttcgagctgagacaattctgcctcggatatatcgagcttacgctctctccgaagctttctaaggctgtcaattcgtaaagaatcagcgtttaaggttttaatggcattattgacttcagttttcattagcttattgctatattgaaccatgtcattataggcatcgagcttaacttttcgctgacgaattacttcatctcggttaacctttataacaccattttcataacttattgctttggctaattctttatctttttggattagagcattagcttcattggcagaaatgctctttccttcagccatcttttctaaaagttcgtttaaaggagcaacttgttctttggtgttattaaaaatatccccgttaagaatgccttgaacagagtcaaactgcattgactctgacatgcctttgattacatctttaatctgactgatatcatttgcgtcaagcgcttctttgagcttttgaccaaaatcttcagcttcattacctgcttcagcaagagtttcccctaaatcaccaacttccgatttaacagaagaaatggccttatctccatctttaatgttcttttgtgccttatcaaaactcaacttaaagacatcaatagaagaactggattttgaataggtctccaaaagggtttgcagatcctttttcgcgctatcaaatgctttttcatcgtttgaattcaatgccgattgcattttctcttggagtttacccaatgcagaagagaatttatcgagatcatcaggattcaaatcatcttttaaagtgagtttacctacaatgtcattgatactcgtttttaaagtattgctgatatctatagaactgtatgcttgggcgattgagagaacactgtctctaacctttgcatttccacttgctatgtcagattgtgctttaagcataccttgcttcgctttatctgcagcgattttataatcttcatcatcagcaaggaagtcccattttggtctgcctttatcattataatcagcaatttgtttgtattgcttcaactcatctttagactttttaatttctttagaagcgtcctcgaaagttttcttggcgctgtctttagtttccgtctttttaagttcaaggtattctttagtgttctcaatagcttcttctaaagctttattactttttaaaattgcatttccttgagagtcataaccttgaattaaagcggggaatgtctgagccaattgctgagtaacttgaagatattcttgctcttcatctgatgaaagggttcttgaatctttggctttttgaagctctttatactgttttattagtttgtctgtggagtctttgttggttgtaattgcttcaacattggtctgttgactctgttcaaaatcatctttagctttttttgcatctgcgaaagatgaaactatgctttctaaagcccaacccaacgcagcaagcgcgcctccaaccactgtagaaactaaaagccctctaagagcagttttcaaaacccttgatgcaacagcagcacgggtcatacctgcttctaatccgatgctagctaaggtttcttgtctcattgcttttgagcctaatataagagttgtagctaaagttcgagtgtttttactgagtaacaatgtagcagtgctaatcgtcacaaaaagaggggggaggaaaccaacagtgttaattattccagtggaggcttttaacaaagaacccagagcttgagtgaactcaatcaatccgtcactaataaaggcatccgatgaagctatagccaattcagtgaaattgttttgaagtttatttaaccttgcttgtaagctatctgcgtatttctgctgttcgctccaagcgctacctgcagaattagaagctgttgcggcggcattttgggcgatagagaagttgttcattaaggcattaaatcgagacaattgatggatatttgcaacgccaatagaggtgttttgtctttgagcatcagttaatgtgttccatttggctgctacctcattaatcaactcactcgcagattttgcttctccgcctgcagtctttacagaaattccgatttcatccaacgctttgattgcgcttcggttgttacctatccgggcaaaaatagttttaagtgagttaccaacaacgtttcctgattcacgagtggtacttgcgattgctgtagtataaccaatcagatcgtttaattcaacaccgaaagtcgaagcggtgcttcctgcttttcgaatagagttggccagatcaagagtagttacagcgtagttgttatccacttcatttagcttgtctgcaattgaaatagaatcattggctgcaatattgaagtttaacattgcggcagttaaagtattaactgtgtcatcaggagttaagtcagagacgttttgtagaacctgcgcggtttttgttagagttgacaattcactttcatcgaagcccatacgcccgaaatcaccggtcatttggagaatgtcagtgattttgtttgaaagtgtgtcacctaaatcgattgactcttgaagaagttcattgtacttgtaatcaggctcattcatcacacgtctgatgtttgtcattagagtatcaatttcaacagcctgagataccatttccttgagtccagatatagcgccgtagaacaaagaaccagagattaaatatgtagacatacttttgaaagcttgcgttagctccgcaccaaaagacgaggcttgactagctgctgcttgcgcatttgaagccaattccctgtattgcatgttcaagctttgcatttgagctctgatattgcttccgccggcacttacattaaggctattaactgcattgaggtactcttggatagcttgtctatttccagcgcccatcgtatcgccataacgcgtattaaggttttgtacgtttacctgtgcttggcgttgataaagctcaatagtttttcggagttcattatttttagccacagcagcagacttatcatcgagcattttaattctgttttgtaatgcttcaatttgttgagctgtttgagcagtgtttaatttccgcccaagggaagagagggtggtgtcagttacaattccttgctgtctaagtttttctaaatctatctttagttgttcaattgcttttcgttgctgatcgtaatttgttgtaacttttgatgacgtagcatttgtctttggatcagtcgtatatgttatatcatcgaagccattgcggttcttttgagttaccctcgtcgtttgtccttgagaattcttctgttctgttcttttctgtacctgacctagtttttcagtcgcttgagcaagcctgttaacttcttgggtttgttcacgtagtgattgattacgattgtcgatgaatttcttttcacgctgaatgatttcgccatttttcttatattgctgcgtcagcttttcaacagtgccatcggcatttctggtaaccgttgtggtttctttaattgtttgattgaaggatttgagatgtttttggtaagtgtcaactgcagaggagaattcgttgagagtctttaaagcagaggcatcaatattggtctttaaattaagggaattaagctttttctctaaagatttaatttgctgatttaactgttcgacagtctttgaggaggtatcagcttttggggtcagtattatttttaaatcttgactcaaaaataagtcacatcctttcaagtggggctaatcagagcaaataaaaaagccactcaaattattgagcgactgtacttgttttcttgataattacatccatgacaccttgccaatactcagcgttttttaaagcttgctgtatgatattcccatcttttttataaccttgaggctcatatccatcatcctcgcgagaagggaggaagtggatatagtgtataggatttttgaggttttcgactgtaattttaagcgtaattgacttcaccatttctgtttgagtagaggaggctgacaaaccaccaattgttgcaccaattccgccgcctaataatcctccagcaataatccccgatttggcaaccttcgaaatcacctggtcatccagtgagatttcagattgaataatttgggcaaaagggacaacatactcgtttatttcttctccatttagctgatataccttaaggatagatttatcttcattgtaagcaattttagttttataagtgctaaagaaattatcagggttaaattcgctatcataggtctttagtgtttcagcattttttctaatcttttcagcaacagttgcattttttattctgtaaggttcgagcgctaaataagccaaaccgccaattatcagaaaaacccccaaaggtctccagccatccattaaacagaagaaaaggctgaataaaaaatagccaccataagccataatcttatagcccatccaaccaccaccagtattattttcctacattatatcatgatttccaaaagtgtagaactagcaaaggggagggtcactttcctttttcggacttaatctgctcaagtaattctttaaaatatgtagcagtaataacaatgtccctatcctttcgtacaacaaaaagtaggagaaggcaaatcgatgttgcgattagaatataccaaagcaaattaaaactaaacataattctgagagatagtaaacatgttcctatgagcacacttccaactgtccacattttcgtatgatcgaaggacgcttcaattcgactcatacgggaaatagctaaaattaaatctgatgaattgagcgattttaggatttgaaatttgcgcttttgttctgtgtagagctcaccagagtgcgggaattctttttgtatgtatttgatcaggtcgcgactattcatctgtactaaattgtgtttaagtattgtcttattcatatttttcacctctccatattatcgtcaaatatggaaataagtttaaggttttatccataagcaaaacccttcggtagaaggatcttgattctgcataaaagagggatttcatttacacttcaaattttgctttcttgtcttgaatagcatctttgtttacttctagatagtgattctttgttacgtcagtgcctttatggttcaataattgagacacgtcctctagactcatgccactgtgatacagaaggttactaccactgtgccttaaatcatgacagtgtaattcaggaatatcaattatttctccgattctctttatccaatatccttgtaaagttccggtttcagctttcttccatatgcctccgtactttgttatgaaaaggtattcgcattcaattccgttttcggatctgtactccagccattccttaacaagatcaatagctctttgagaagggaagagggtgactttatatccttctttttcaatgacatcttccacccgaagtctttcaaagtcaatttgttcaaccttaacgttgcttatggcattagctctggccatcgttgagagaccgaattcaaagaagagctctaactgaatattttccttctttttaagtccttttctgatttcttcgacttgttcttttgttaggaaggtctgtttaatttgaagtttttcaccagttccagctttaggcctgtctaagaagtcaacgggattctctttaatcttacgttttttccttaaaaataaaaagaatgagctaatactactcattcgtctctgaattcttcgttcattattgcctagaatactggtgcaaaatgcaacaaagtcttcaattaaatcaaccatatcatcaggatcttctttaataatatccacaatgtgctgattattgtaattctctaaaatgtataccagccattgattgaaatctgattgatatcccactttactggattccgaaaggttcatgtttttaaagacaaaatactttcggattaattccgcatttttggggttaattttgttgaccttttcttttgttgcatatgctatcttttttctggccattaatacaccaccgttattctgttttaataccacttgtatttaaatcttttatcatagcagcaactaatcgtccatcttttaaggattcagcagtattcttcatgactgggcgaggttttccgtaaccatagccgtatttatctggatacgtgtacccttgaccagtctcaacaaccgtagcaacatccttgccgttgtcttcacggttgttgtctaatgaaattccgttatattcgttttgaatgacaaaggagtccttcaaaagagaagtacgttcatatacaagaggatcgtatgtgtcatatacatcagattgtacatgctcttgacccgttttaatcatcgtattttttgtgctggattgtttttgaacggcttgctttgcggcaaattcaattaatgctgctatttcttttatgttcttggccattattcagcctcttgttcattctcaatctcttcgaccttattaaggatgagatcatttatttcttcaggagatatgtttgaaagtttgtctaaattctcttgcatcatctttgttgcttctccaaatttcttcatgctttcttcagggaagctactaataatcaatgggaaaaattcagagtccacaagcttaacaaaccacttaactttgtttttgatatcacttggaatacccaagtctgtaaattctttaattagtgaaaagaatccccattgaacaggatttatgcttttaaagtcaatgtttttttcttgagcattttgtgggtcagtaattaattcagtaagcattttggttaagcgggtaggggagaagtaagggtaaataaaaacatgaacgtcctcagtaagttgtactcgttctttcttgtcatatttacttacactttcttcaatcaacccaagatttaattttttcgatgccatctcatttcctccttatatatcctctgcacacattaaaaaagacacctcaataggggagaggtgtctaaataaaacttgtattttattctgtgtctgcttcttcgtagtcttcgccggtgatttctttgtactcttctaaagtgactaaaccattctttactcctaattggagctcttcttttgtcacatcgttgaattcctggtaagcttctttgacttgatcgacggttgcccattttcgactcagggcattaacccaataattgtatgtagttattttatgaacctccctttagatcagcaatatcttttaacattgtgtttattgttttgttgacttgaagcaagcttaggcggagttgggatagggtctgtcctattatttcaaaatcgttaggttcagggatacttggtttaacgctatccttgtattcttcagttgctgattcaatccatttatttttcttgggatcatatttgggcaagattattgtggggtctgggacagcagttgtactatttggaggaagagcatcgccttcaatgaagtcttctccagcgtacataaagttctcatcataataaagaacatgcataatattttcacctactaccataaaggaattcctatattaaatgaaactctggaaacactgttaatgtcattagcatacaatccatcaaaacgtaaatctccatctgttgtgaaggcaaatctcgctgttccatatgatccaattgtgggtactacaaaatccactagctgtgttggcttggttgagaatttagcaactgcagttccaatggccggcaatgttccgaaagatcctcttagccataacacattgtttacacttgagaatttgaaagggtaagtggagtattgtgtagctccattgataagtgtaactgggttccaagaacctgacgtgccactccatctggctttgtcatctaaagtaacgtgaatatcagtttttgcttcgtgggcatcggtgtaagctttcgccgagctgagtgcggtagtagctcttgcttgtgctccgtcagtcgtctcatgtgtttgccaggaagtccatgttgaatcgctctttctaaaacggaaataagtatgtgttccgtaatatgcttctaatgcgaattgtgcaatcgtagttccatagttcatgacagctaaatagacattggataagttggcaggggagtgaagcccctgatttgcgattaaataaaacccagtgttaatcaaatcattgtactccgttttttcggagctacctttgtagaatactttcccatcatcgtcagtgagtttgaaaagttgagcagcgtcccatttttctcgatcagacttgctgatatgaacattagtgtcattcagatgattatcaaagtcacttttagtagcttgttttacattgtctacattcccaagcccaacctgttcagcagtaaccttgtgtgggtttgattgatcgttagtatgttcagctaaaaaagactttgacctttcatcggagctgttccaataactgcgctcgtcctttgtgatatgtcgatccaggtctgcatcatgagcgtcaaaatcaattttcgctgcttgctgtacattatcaaccttagataagccaacttggcttttagtaactgaatggggatttttcttgtcgtcaagatgtccatcaaaagccacctttgtggcttgctcttcattaagtacatttggtaatccgacttgctctttagttacatggtgcgggttttctatgttctgagtatgcgactttaattctgaattttgcttttccatgaactcatcgaccttatcggataaacgtttttcatgatcagacatgtgagattcagttctgaaaaattgatctttaaggttattgatttgtatattgttttgtttgagctgacctacaaatttactgctgctcattaactcaccgcaattcctttaaccgtaacatctccatttacggaaatgacctcaaccatgaatttgaaaagccccgcaatatcgaaatcccagttttcatttgtattcaatgtacccgtacctaattgaaaatcagttttgtttgttccagcaatttctgtcttttcgccattttcatctacagcaaagaattttatttctcttgaagttgaggaaccagagatcttaacagtaatatcccgataatgtgatactacaaattcttcaccttcagacggggcagttgttgcttcgtggaatgtaaaggttgctttatctggaatggtttttaaaatattttcatcggtttctgtcaacaactccacctcctaaatctgtttaaaaactgacttttatttaaaaaggagaggggaagaatcccctcaaattatttagcttcaaatactcttacgtctctgtcagtaccgtcattgatcacatagacataaagtgttttaccagcggcgacaggaactgaaaaaggtttgtcaccggctgttaatgggatacctgtatcagcagttacagttgagttcccaatgtaaatcgtgccttctgcaggtgggtaaatagtaagtgctgttctgtcagtgatacctgcggtaactttttgagctgttgaagtaacagtgaatttatccgttttaaaagaggagaaaccaggatctctttcattcaaggtcacggaaggggattgtacttggatgcctttgatagcatccaaaccagcttgaggaaagtcaacttgtagtggtttttcttgtgattttagatgaatatcggtgattggtttaccagttccatcgtctctagctgaagtgtaaatgtctccgtctttgtttaaaagtgccaagatatcaagctcctaacgttattttgtttcttgcgttgttccaatgtctacactgctattcgatgtcgcatcttcttgttcagttttaattccttttgtcccatcagggttacgcttaacacgggcaaaagtaccgatcttgccattatcatcagctaatgctcggtatccaatttcaggtgtgtaggcttgtccagcctctaaggacatgtctgcttcaccagagaaattaactttaggtaactggatataaaggtcactgtaaatttttgatgtctttggatcgtactcaagtgtgtggatttcgaagtaatagttctcggagaatttttcaccactaatttcaactgtttctgcatcaacttcaatttgatagtgagctgttacagcgttccctttagcagcaaacgtttcaggaacagtaattgttttgtctgaaacattaaattcttgttgatctccgtcttcatttgtaagtgagactttggataaaggagtatacgcgattttgattgtgccggtatcacttacagtaagactttcatcttcccatacagaaatcgtctcgttttcaatttttacaccttgctgcattgccataaaatcaagatcaaagaaagcattttttacgttgcctgaaacctctttgcttgagttgatgacatacaggtctctatttccccatccgccttttaaaaagtcttgttggacttgttgggagaactgagtcatttgtgttacagaagatgcaacaaccttgtggtcactaagtcttttggttagcaccttgccaacttcatggataactgtttgttttgccaagtgttttcctcctaatttaaaatgaaaaagagactgtgaatcagtctccgaataattgctctaaatttttagcatctgctgtactgaggtggtgtttttcttctctatacatatcaacatgactattccagtcaccgattttcacatcagttgatacagtggcaaataacgcagaagtgttataattcattatttcacccattctgtaatatgacaggtacaattgataaattgtcatatcggctacctcttgatatgtgtatccattaaatgcagccacacagctagcgatgtcctttaaatcattttgagaattttggagttttaattgattattcaaatcatgaaactcctgtaattcatcattctcaacaattttctcttcagtcaggcaatgcatctctaatatcaattttctaacattgttaaatgctctctgatcaataagatgtagtgattccttgtccacaaatactttgctaaacactttaaaataagcctggttaaattcgggtaagtaatcatgaacaattttgaagagactattcttcttcaattcgataattaaatcatttaatgaaccgtcattgttgatttttgaaaagtttctgatgatttccttcttgctcattttcatcatatttagctcgcttatgtactctgggtaatctcttaagtggataaagtttattgcaccgacttcagtattaataggccttcctaaaaagaaaaaatcctttaacacattcatttacttgctccgaaagtgaatatcaatttgtatcccaagtacccttcaggcgcatttgatatgagcaaccttgtatatttaacatttttaccgatgccagcaaaattttgattgaagagcatgtcacaaatacgatcagtaattttcaggttcctgaattcggtctcctcataagtgttaatgtgtgtataaacatcaatcatcaagtcttgatctagcagcatcacactttgggttgagggtttagggattccattgccgagataaacacaaagtctgcatattggttgatcggttaaatcatcagttttgggagcacgtttaattattgagcttaatattgatggggaatcatcaactggatcataataattttccaacgtctgaacatcagggagagaagaggagagagggtcatctttataatataaaagacgattcaattctgtatcattcataatagttctaaatacagttgtcatatgttcaaccatcatactcaatcgctatcacctccaactttctttttggctataagtctaattgttccggtgtctccatagaccttggaatagtctatatcatcaacacggaattcctcaccataaaaagaaagaaaaagacccttctttaatttttcatgttttaaaaaagggatggtgacatgtgcttgcccttcaggaatgtttatagccaattctgatccaattgttgaggttgttcgttctaatacacacgggatgtcaaccttctcaccaggcactttaatctttatcggtctccctgtaacttcatcaatctttccagaatcaataagtttgtcagaagatgttagactgattgatgaattgcaaagccgcatagtagcactgtcattcattttgttatcagtggggcgcgcattaactaaccagtaactaccgtcatacaaaatcaagtctccacgatttaataagcctaaaactgtaaggactttttttgtttcgctgtcctgagtggtttgaattatcacctgttctggcttaccattcaattcaatgtcgtaagtttcaggtgaatttgctaagatttctttgaaaatttcatacttgtttgaattaaactcttcgttttcccagccactcaaataatttgaagaagaggttagataccaatctatagacatctaatcacctcaatcaaagttattcactttcagtttgctcatttttttttcaatctcatcgacaagatcttcataggatctattaacctgagctttagtattagataaacctgtcaattgaacatctcttcctacaacgttgtttaattttaaggctctgtctcgatatctgaaagagaatcctttgtacataagcattcctaaaacttgaatttgtgatgaagtaaggggatatttaaatgtattggacttttcatcataaccaagttctgtcagttcggtttcgtattcaccaactgcgttaatgaaaaactgctgttcaaggccatcagggagaatttcatttgattgaaacattgagtggaaaacgttaattattttttcataaggagtcaagatttaacctcccttatgattgagtatcaaatttaaacccagtgtattcttcaatgaacttgatcttagcgtaatcattaatcttttcttttttagctacatcaaacagctgagctttttcagactcaagtaagatttccttttgaacattttcttcgaaggctttttgggttttgtatcccaagatttgtttaattcgttctacagtaacaatttcttgtttgtcgtctttatcttcggtctcaaaacctaagtgcacacgggtttctttgtcatcaatatagattttggcatgagtaccttgaccgtcagttccagtaaatagtgaggtattgtcatagacttgggattgcacttccccagctgtgatctgtctaattccattggccggcaatctgaagtcaccgtgagagtcaatctttcggaaatataaatcccatggacataaatttttaattgtaatctttttatctaaattaaaagacatgtaatccctccaaaaataaaaggagggacacagccctcctaaattttaaattgtttaaatttgtggtaattcatattttgtgtctctgatgagaccaatttgatgttcttgtcctttggctacaccagctccaatttccatatcaaaacgagtgatctcagttccagtgataatgtcgttaccattcatcgatgtgagtccgcctttttggaaaacttgaagaggagactttttaccttgaggaatgaagaagagaagtccttcaggaagatatgttttgaagttatcgccggctttatttaattcagttagattataagcattaggtaattctacaacagaagaacctttataagtgttaagtaatcctgttcttcggatttcatccataacagactgagggagtttagtgcttgaagcatctccggttacagcctggaaccctgcaaagtcatttaactgagaaacaacagaaaagtcaccaacaatagaaggttgtccaaatcggcgaatctttgtgataatatcgtctacagatgatttggtgataccttcagtttcagcaaagtatttaacacctgttgcatttttaattgcattgaacatttcatttactacatagtacatcgctttgttcatcatatctgtttgaacttgctccatgccttctgctactttatcgaggtttccactttgaatctcacgatagttaacagcatagccagaagaaatggtttgagttccaatcgggtattcgctccaagttgtagtagcgaacggtacgtcaccacgggaagcttggaattggcttcggatggattcatgcgcgtatgatgtcatcattggttgctgatcatagccgatagttctaaatgtgcccataaaatcaaatagcttaattgctgaaataagcttaggctcaatggcataacgcacaattgtgttgatctcggctttagctacagggttgcccataagagctttggaagctagttccttcacatgggtcatagcagcattggcttttgctccaaacttggaaagatcttgacctgttgcagctgcagaaaagatttctacaataggggacttagcattcaatttagcatttgcataatggtttgagtctttttgaacattgtttaattcaactgtaaacattaataattacctccagaatataattaagcctgtactgttaggtacaaaccttttccgccaaatgtatttttctctaagacttttagagatactttaaactctgcaacgtcatctccagctttaacccatttacctgatttgtctgcagcaggaaccaatacgtcatctttaacaagcgcatcataatcaactactacgtctgagctaagttcaattggcagtccttttaagtcagctaaattaaaagcaaggacatattcaccttttagaactttgaagtcttctttattgcgaatttcaggtttatcaataatgtttccaacaacatacacatcaccttttgcagttgaagatgcacctggagggaatgcgttaccagaagaatcgttagggattacgactagaccagggactaaatcgacactagccttgcaacgtggattatttcgtacttgtttataagcaccaattgttccgaatttgaacattgagtattcctcctaaattttataaaagtgttattttatcttaataaagatcatcaatagtcactgaactttgttgcccagaatcacgaacttctgaataaatatcgaaatttgtgctattagtctcagaggcttgcttctttgagcgttcagtgatgaaggatcgagcgattgctgagttgatttcagaaataatttcgtttttaagctcgacagaaggagacttagagaacatttcaattttctcttttgcgacatccttttcttcaggagaatattcctttaaagcttggttaagctctccttgcatcttttcggctaccgccttgtttttgaattcctttagggaattaagctcttcatctgccttggctttttcatccttagctttttgcgcttctttttcttttgcatcagccttagctttttcatcctttgcagctttaacagcggcattcagttcttcagttttttgctttaagtcctcagtaagtttctcaactttttgatttaattctccaatttctttattcttattatcaagtttgttgtttaactcaaggactacttcttcttgagattttggcattaaattatcctccttttttttactgtttaattcaagcaaaatggcagcgtcgtctgcagggtcaatacctaaaatggcatcacctgtaaagtcaaatttcataggtatacgtccttgctctttccagccaccttcatattcaattgcatctgaatcttctacagctgctatctcaaccgaggtctcagggaaatcgccatcaaacatttttgattttaaccattgaacaaatttaggatagcgctggttgtataggaagccttcagctattaacactctttttggctcaccattaacatcaatagtgtcaatgtaagcattggtagtcgtaccaaccactgcgctgttttcaaagagaggggtgccgtccttgacttctgttaaaccgtgtccgaatggctcactgttttcatcatccaagaattctgcgcaaattggcattaacttgattgattcaaggttagcgtttatgtatttctccagccaggtaataccgttcttgttgaactgagtattgttttcatggatttcgagaacgacccacttgatgtatgtttgaccactggtttttttctgattgttaatttctaaaatcgtgcttttcaaatactaatcacctcctctcaagagccagaaggcgttccgttactgttatttgtcttcgatttaatcgtgttttcatttttcggatcatcgatctcaggtgcgccggctgacttatcgttattcttactcattgtgaaagaggtcgcatgaacagggaacttttcatcaaaaccttcgtctttttcatattccattagggataagtaagcatcaggattccatccagtagcggctatccaagcaataaggcttcctcgaccacttgtataaaggtctttcatgttttggactttttctttcctgttaacgtgggtaagagggaggtagtaaacctcaatataagagcgaggatctttgatgatattggcgtttatcaccttgttaaactcactttgaatttgttctaaccaggagaatatttgggaagaaaccatctcgatattggtttgttgagaagaatagttaccgtcttgaccattgagagcagatcctgcaaatcctaaatttgtagtgattcgtttaatgagctcgtcttcacctttaaccttcaagaaatctacattagtttccaacttgtctaattttgttccagaggccaaagagaagaacttaacacctttaacgcttcctttagcaactaacgctttttttatattctcatgctgctgctcctgttgcttttgagataaggctgatttgcctttttgatcaccttcagggaaagtctgataaattaaagtgctgttgagctcatctaaaatgtttcgtttagtgtcaacaaagtattcatcataaaccatatcaataaatgcggataaaccgattgggcgtccccattgatcttcaatgtcgctacttcctttaacagcaatagtcttattgttatcaagaactaaccattttcgattttggtctttcttataacccctatagccttgtctgatttcttctggccatcgtctaagcttgagcgatctcccgttacttgtgaacttatcaaaataggagacatcaaaagctaactgataagaggaatttttccttccgataattttgcaataatcgagaggaagagggaggacggaacaattaaagtcgtcaatagcatttgattcagttattgatccgatctcattgtcacttagagtggtggggaaagaatcatccactacagaatcaaaataataaaagccagtgccatatttgctgagttttcctaatgcatccctgacagcacttttgtcgccgatttttcttaaagccagattgaacttttgtttgttcgatttgaaattagctactttacttgatcccaaaataactctgtctaaagtagggagggctaccatgtagtcaataacgtttctatacacaccatttgcgttataaagcaatttagaggcatccctaatctgtttattgtagacgttgtggtctttcagccatgatttaactttgtcgtaagaaataccgttaaataaatcattaaagaacaatgaatcaagcggcgctaaatttgtattaaactcatatgatgactgtggttcagatgtagtcattattcacctcctcaatttctaattaaaaaagaatccaaatgaatactcatcatcggattcttccttttctaaaaataaagctatgtaatacagcgcataagcaattgcactgtacctatccttatcaattctttttacaacttgctcaacagtgaaagaattctgtgtctttttaattctgaggtttgctacttcgtcaataaacaattgagtttgaatacatgctgcttcaatcattacatcatcagatatgcttttttggttcttgatgtcatcataggatttaagcaacttcaattttccggactcaacataatccaggaattgagtaataatgtcttggttaataccttgggattttaggttgtaaacgatttccggcgaatttgggacatctggcttttgatcagtgtttattgtggcccagcatccaagttcttcattggtctccggatccgtaacatcctctaataaccggtcgattaaaccgccaccgactccgtttccatcgacaataacagctttaactcttgagagagaagtatcttgatttcctccatagtttttgaaaactctttttaccatgattgattgttctttaaaactcaatccgtttggtggctctataatattgaccacttgaacttgcctaatgaggttattgctgtttctgattatcttcaaaacaacgatagctgttttattgtttgattcagccgcagagcgggctacgtctaccccgattacatattcatgtagcaagaagttcttatttttatctctaggacaagaaagttcagggtgggtaattgtccgagctttgatcaatttactgatattaatcaatgcgccgtcacttgcaccaatccagtcacaaaggtaattctgacggaagcgagttacattcccttgtcgcgctttattaataacagacattttttgacgaccaaagtgaataggaatgcgccaatctgatccgaatacaaaggatcctttaagatcaccagtttccttaaccatcgtaaggattttttcgtactcatctgagtttttatatcctgatgtggagaaccggttaatctgcccatttaattcagcaggatctatttcgccagtcatggttgtacgagggatgttaaaaatcggctcgatagcatcatcgtataaatctttatcaatcaaggcagattcctctaaggagccacgtcttctacgtaaacccttagatgattgggcgtttgccaggttatcgatgatcgccccgttttgaaattcaactcgaccactgtcttttgaaaagttttcactcttgatttcatctttaatggaagggtaaaaccttaaaatttcctcgtgcttttctttccaaattttcaccgctgattcctttgtagaagcggtaatggctaacgttacattaggaaagcaaatagctgtatggtatgcaaccatgatctgggtcaatgtattatgactaactaatccattacttacaaatgagttggttaaaggcatatatagatcataaacgtagttctcagagtcttctgtttcaattactttagtgtaatagtaattagaatcataaagctctactaaatggttgaattcatcgctatctttattatcaaaacgctcattttcacttaataatagtgataatttttcgtaagtaagatcattagatcctttaagaacatgataaaatttatctcttgttttacctttaggataaattgctataatgttatcttgctgataagggatgacatctttatttggattgcgatttttgttacatattgatataagtttttcttgctttcttgaacaactaaatccaatttcccgtaaaaaaagatcaatattctttgtagaaatattgatcttataatgataagtattaaattttttatttagatatttttttctgaaagaaataataccaaagtttaaaagtaacatttgaacttgtttactcattttttctgatgcagtgcaaaattgtacgcttttatttgtcacacatccatcggtatcaaatagaccttgtattgtttttgcaacaatatttttaggtgctttaagtataattttaggtatttccttaccaaaagcatctttttcttccagtcctaactgtctgaagaattctcgaatgagcttaccaaatacgataaaattaattctatctttttgcttaactgcaatacctaatacgttgttaaaataatctatataattatttaatatatcttcgtcttcatttgtaaaaagtattgaattgtttctagtcaagcaaccatcaccaagaagataaccaataattaatgctaattgttcatcaatgtattctggaatattgaatttgtttctttctacttgccatctgccttgattgctaaatccatttaagaaatcatcaaagcttacatttagctttgtttcacttccaaatacattattgtttcttgaaataggtaataaatctccaactttaatttcactagaatttttgtatcttagttttccatcttcacacattactaatactgggtgatttaaacttgcttccaagtcatagccatcttgagttttgattttcttcgttttcttgaatccgcttgatatgccggccatagaagtttccattagaccatatctgtttttcattgagattttatgtattgtttcaacttcagactcttttttttcgtaattgaatagttcgccaatttctactaatccattttcagtaaataaaactgtgtctcctgcaacacattttgatccgccacgtggaatacagaagtagttctgagggaagcgactgagtgttctcatcataactctttggtataaatccagctcaattccgccgacttcgggtttcaacatatcgtaaaaaatgtctggataaaaacgaataaatgaggtgaactcagcccatttggagatattcttgccaatgaagtttgaattgtcatctggattcagaggggtttcaaaagctgcgtcgtaaatatctgttctgttttttgtgtgcttcttgtttttcgaggtgaagtttttataactagccattaatcttcatcacctgtgtcataaagaggttctttgtacacattctccaagtctctgaaaacattgttgcgagcactctttagtttatcaatttcttcaggcgacaatccttttgatttgaagtcttcttcaagcatttcatcataaaaatggtaaatgtctttgtaatcgactttttccttatcttcgagccttctgtaataatttataatcgcccaaatgattagatcagcgtcatcatatggttgggctgctaaacgaggaagaagggggataatgcccaattctgtttcaacggcttcaaataattgagaaagtacatcgactccaccactgatatcgctcttacttaactgagatacattaatttttgcatctgtagctgcctttgaagctaatgaaccccattctttagcttcttttacatcacctttagcagttgctaattcctcttttacacggaaacgaatatatgaaagcaagccttcagtatgaagtgtggttttttctccgtaatttcgaataagtttattgtattttctttcaaactgacggtactcatcgggggtgtaaccaataccccatttatcaatcaggtcatctggaatttcagattggctaacaccagaattgtttgtaggcgtagattcctctataagtggcttctctggttgtctttcaaaaacactgtctttataaccagtaccgttaaactgcttcaatgaattagccattgtcatataagcactaaatgtatctgtttttctcttttcagcttgttcccaatacaacggatcaaatttaacatcgatctgctgtaagactgtatatattgactcaatattgctgtaatcaatgtttttcttcaagcaagtcttgcaaatagggacttttcctgttttctcatacagactacttcgtgaattatagaaccccgactctttgtccttttctttttgacaagcagcacagatcaatttttccttttctttagcttttcttggcattggttcacctccaaaattttggttcaaaaacacgttttataaaacgcccagcaatagagagggagtcgagatttctcaaatcatcactggacgttctaaaaaagtattttatttataagttaaggcaccgttttcggacaaaacaaccttggttccttttaaggtatcagcaagagcatccagcaaaccttttccaataccgtttgcatcaattattaacttactcggtcgtttgtctataataatggcttttatttgactagcctgatgtttaaacgttccatgctccactttcttagagatgtcctcaatacgggaattatttaaatcaataattaaaaaggttgtttcttctcttctaggattaattacagcaattctttcaggattgtagcccgtgctcaatgtgtagctagttccgtttaagggtttagtagagaatttgacgtctcggttcaattgttcacttttagtgtttttctcaaatcccaggcttttatgcagacttgtcagggcgtcttttaattccctgttacacagataaccactatcattaatttcttttagcagctttacatattcccaaagaattttagtttcttctttcaatcttcctcatcctcatctttataaaattaaagttttatattaattaacaatcaaatttactagagtgctcttactttcaggggacaggttgtcccactgcactgctaatatttctataaaatcgtttgcagacataggatcattccttttacttttcatttttaaagcgaattatgtatgtagcctcaatacctgcatcatcaaaaaccataaatttttgagaaggttttgtgccaaaccgaccttgcatagcataatcatccgcaccaacaagcgctccgtttactacaacggttgtgctgccgtactctttttcataattgtgatgaatatgaccaccgaatatgtaagaagggatgtagccaagtaattgaggtaatcgtgttacacactgatcaacacgatcgtagtgtccgtgcacaaacacgacttcctgattgttgattttagcggggatgaatccgtcttgctcaggttcaatggagatgttctctatgttctttaatctggcttcaagataccaattaatgaggtattcaaagttttctttaatccctacatcatttttagaaggggagaggcgaccgtgattacctgccacgttgtagaacttaacctcttgaaactcacttgccaacatcgctaaaacctcggcaagcgtttctgatacatatttaatttgttctacagcatcttcattggcctgaactcttgtagacacatgaataagacctccgattaaatcaccgagatttgctacatgcagtgtggaaacatgattctgcttaccatactcaatcactttgttggtgagatgttctacacgttcattaaagatttctttattgaatttatttatgcggttgtcgatttccattccgaagtgccaatcactgaatagagcgagtccatgtttttcagcaatagcaggtgatgggaaggtgaagcgaaggggtctttttgactctaaagatgcaatagcttgtacgacatcatctttaatttgttcaaaccgtgcttgattggcaatgaatttccgatattctcttttttgatctcgtgctttgattgtttgtttttcggattcaatgcgaatttcttcatgtttttgttgaacttctttgttcatattctttgagataaagtaatcgtgccagcgctcaaattgtttaaagtctttacgccatttgctttcatcatagttggttccctgatccttgtttaaaagggcagcaattgtttttgtgtcaatgtgataagtgtctttgtttttgaaaagtctgatatgataatcagtaaatgattcgtctttttctcgttgtaaaacagtatctaaaatagctgtcattcagtcaccacctactcattgatttgtggaagttcgtcttcttcggtaatagaaattttcactttccgaccgtcaaatgattttaaaatagaattcagatcataacgctcgatgtctgtttttgtttcttcttcaataatcccatcaatgtaagtatagttaccttttaaatttactgtatgaactttcttagccaaattaaattcctccaatatttgttttatttacgtacaataagctccttcggaagcccgatgatccgaaacatcggtaacgtccgaaaaggggatataaggagatgaaaatatgagtcggataggcgttggggaaacgcccgaaggagattattgaaaacttgcgtaccagaagtctcgtaaggacattccggctgatcagtaaagtaaaacgcaagcacaaaaagacctccgccgtagggtgcggaagcctcgttctgattgcgtctatacaccgagatcaggacgcatcccttactcgctcgcttctctgccggacaatgccggatgtatagttggcgctgttggcttttagcaagctgcgatagcttgacacgccgccttggctattcgtttattatgcggacgaggatttgcacctcgcatggacgaatttcaacaaccgttagccaaaccgactattaagtagcccgttgtctacctcacagcatcgtccttatgttcgtctaagcgtctacctattccgccaccgcatcgttaggttttaagacactcgattctaagattacctgcgcttgattatacgcttcctcataatcgccgctcttaaactcgtctaatttttcccggaattctctatgacgttttaagtaagcgtctttgtcgaatttaatacgtatcggcattttcgtcctcccttgaaaaatatacgaaattagcgtttttttacataatattcattaactcacgtaggtacgcaaaatcgacagggaatacgctgattacgggttcatcgttcgaaatctttgtaagtcgaaaataacaaaagacgccaaataacgtcttcagaaactccttgtacatcatggtacatgagcataaaaggctggttatcgctgtgcgaaatccagctggctccttctacacctggcagatgagctatgataacaaaaatacacgctttaagggacgtgttaaaattcctattacctttacatcttatatatcaagtttttatgttgcttgccaactgctcagtagagtctgagagccaagggaaaaataatttgagaaggaagaccctaataagccttctcaatggcattttaaatgctcttgtcgggttacacgccttattgagaaacaaagcgtctcaaacgctcgccatttattttgcacagttttctctgacccgtgtaaggaggtatgtgcatgggaaaggtaagtctccatacagaacattgaaggagatgaagtgaaataaagtgaacgtgttgctaagtgaaattgaaaaggcaagaccgaaaataatccttttctgtgaaatgggagcggtgatcaatcgcccaaaaaccatctcacttattttgcgaggggatgtaattacaaaaagcctcgctaacccggaaaaatttttatgtgaccgcataataagcatcaaagcttacaagggcattatttaaagggaagggagacgcatctaccttacctaagtgcaagccgaagcaatacaccgcaattaatattcaggctatatgccacccataataagaccctgatgggattcagtcgcaatttgcaataatgcgttaagtcttaccgacatttttagcccgataatagccatttacctgtctctttttagatacagacatgcgagttaacctcgaaccctcataagtgaccattatccgactaactacaatgaccagttgtagctgtaaagtcgaatttaatgcttttgttcgtatgaaagtgagaatagcaatgtttagaaaaagcttaatccacgatggggcaataccccgctaatatccacttatccaaaaccctggcatccaagacctcaaacaaatgaatattagcggagaactgatatcccacatatcagtaaacagcttattattgacgacacccccatgccatcaataaaagaactctaattaataaacctggagatgaatacatgaaaaaagaggggaggtcgacaatttcctccataacttctaactctgccacttttaggagcataagctctatgtgacaaaggcgtgcaggaagcctttcctgtcgtcctcagtaaattttattaagctttcactgcgtcttttagagctttagcagccttgaaggcaggtgcctttgtagctggaatatcaatttcctcacccgattgcggatttctccctttacgagctgcacgttcacgaacttcaaacgttccaactcctggaatcttgattgattcaccttttgttagtgcttcaatgatgacattaaatactgcttccactttaggtgcagcttctttcttagtaactcctaatttttctgcaacttctccaacaaattctgttttgttcatgttttaattcctcctagtgattttgtttatttttgtgttaaagtataattacggtatcgtttgtgcttcttttgaaaaaatgggagacgtactcacccttatatgtggaaattagctttctttctcccttatggcgattatctcaaaaagggctttcagaccagttatatcaagggttcaaggggattttttcgttaaactttttccggtaaaatcgctgtaccccttgggggagtaaggctcaatacactttctatttcgtcatttttttcttactgtattttttttgccttaatcgatggttctttttttcaatttccaatgcacatttattacaatattttgatttatttgagattgacttaaacatctttccacaactataacaagatttaaatctttttaaattattctgcatgttttccaatattagatcgccaaagcactcccataatgttgatttaaatttgcttttctttttatataaatgcttaaccaaaacatcagcaacagattgctcgtcattatagattttcagcaatctgtctttaatgaccttataaacataaagtttttgcccaggcttaatgtcttcatcattcatgagccatttcttgttctggtctaatcgtttatattcacgaataattgcatcgtccaatttaatatccctgttcttgagcaggaagcggtaatcaaattttcctgccactgctgcgaaattaattcggtcagaagggataatggagtctaacttatttactgtgctttcattaattaactcaacactatgttcttctttatcctttgcattgataaagaagtgaggcactttattttttatgtaatctttaattttttcatcaacatgatcaggacgggtcggcatgaataaggtttttgcaaaatcaatagtaaagttattttccatgcataaccatttgatcacatccagatttatattgtcgctgttccatatcttagtgatgttgttgctgtactccccgatattgatcccataagcaagagttagtgcttcatagatgttcctgctattaatcttttgtttctgggctacagacatttcataatacaacggaacgatgttttccatattacgcttggcaatattgacgattaactcatcagaaataattaaggccttatccccgtcattatcaaactgcagcaacttagatatcggatcatgaatgcttgtgtaaacacctggggtaatgaaccacttttcatatttctcatcttttttgttccacctaacaccatgctctctgaataggtgaggggagcggaggatgtcaatatacccttcatcatataaagaacaatggacatcatttcctgaaagcagtccttttggattctggatattcagaaataatttttcgcagaaagcatatagatcagggcataagtatgtataacgagcaccatcaacaagcaattttcctgatttggcatctttaatcatgcttttctttttatttttaataatttctttcgtgtgatcatcgttaagaagttctggatatagaagtaaagcgtcctgaagagctgtccgatgtttctttttctccgtagctccaagaactcttaacatggtttctttgtcagttcccaatgtggtaatctcttttacagtctttgagctcatttgaattaattcttcaccggagatatctgtaagtgtttggagcatttgataagtgagcttcccttcaacagaaggatcttcttcgttgagttttgcccctaagcatccatattttttataattgccttgatattcttcccacgatgaataatacttccacattttaaactggcttttagtgaagataatttgaacatcatctttcactacgtcccattccttgccgtatatatcagttactttaaaagctttgttttcctcagcaaatttgcgaaaatcaaacgggactaataaaccctttacccatgggagtctgaccatgaagcttttgctactcagagtggggagaatcattccgcagccatccgtatgctcaatgggaatgttcattgtttttcgtgtgatctcgtaggtatctcgatcaatatagtcaacgagactcgacacatcagtttctaagtcgtcgacaacaatggctttatcaatatcaatctcccaagggctactggcactgttagataaggccatatagctattccatttgttaatgctgctaccaccaagggagttaatcttttcaatactcaagccgcatgtcaaagcatcctgatacttatcgtaggtgctttttttaatgaaacatgacttctttgtacgaatttgaccggcactgctcgtgaaataaacgtatttttcattgttatgtaaaaatccctgatcaataatgtccttcaatacttcaaaatggtaagtctggacaaccatgatttcctctgaaagggtgttttctttaatccctaatgttcgggtcaacactgaatcaaataaagaaatcactttattgtcccttaagctgtcagttcgaagtgttcttatgtcattatgttcttcgaatgcagaatagaggcattctttaaggtatgtaattctttgtgaaatgtatttcttatgtttattatttacattgtctaatgtcttaagataatctctgtatctataagacttcaaaatcttattatgtaatgaattttctttgtcattataaaatgctgatgtgtccacgctgtatatgtgaacttgcttagacaatccgtctttttttcttttcaatcaatcctctccttactattttatttttactttaaatgtgcttaatattcgctattaagatattgatttactaaacttcgatatgtaaagctttgcttattaatctttccgtaccatttgtaatcctgataaaggtattcttcttcgggtgttgctgtaccatcgactacttttccctcaataaaccccattaaatgactaaataaatactgctttttcatcttacacctccatactattttatttttactcttaaaatgattaaaataaagaccacttcatgtggttgtgtctttattatatattttatttttactcttgtaaacataaaaatccaaagttaattggatttaatttcgattaattcaaaaagatcgtcaactttacaatttagaatatgtgccatcaataaaagattgtatgtactagggaggacggttgcaaatccctcgctgtcatttttacaccatctagatatacttgctctttcagcttttatttgctctgctaaccagcctttttcaatacctttgctgtttagaaatgaatccaacttacttttaaccctatattccatttaaatcatccttttgctgtttgaataaattttataaaatgactggtttacatacaagcagagtatgattatttgcattaagatacaaaaatatttgcatttaaatgcaaatagacaatataataatcgtatatcaaccaagatacttcagaatcatcagatattaaggaggggtcacatggatacttattttgcttctgtcattgacaacttaactcgaaatgatctgtatattctaggcttattgagcgatgaaggggctgatttaaagtttaaatcaattaggaagaaaaccattcaagctaaaactcaactaactgatgctacttttagaaagagcattgatcgtcttgaggccttgcagtttattattatagtgaaaaacagtaaagagcatacaatttttattactcaatatggtcaagaagctttgagatatcaattaaaaagggagagggtttaatgtttggatttattggagttggtcaggccggtggaagtatagcggatgaagcaatgaagagaggatttcattctgttgcaataaattattcactttcagaccttaattcattaatcaatattcaagataagcttcatctggtagggacagaaggagtaggtaaagacagaagcgtagcagcgaaacatatgaaaaataactgggagtcctctattgagttcataaagaacacaatggaaaagccttcagtacaagttattttcgtagttttctctgcagctggtggaaccggttcaggagtagcccctatattattagaattgttaaacgaatgtcttacacataaaacaatagttgctgtaccaatccttcctgacaataatgaggtattggttaaccagatgaatacactggagttacttgatgacttatctatgccagagacctgtgtcttacctttggataatcaaatggttttgagcaaatatgaagggaagatttctgaaagcagactatacaaggagacaaacaagatgttccttgatttaatcgaagtcttactcaattacacggacagaggatcaaagatcagtacattagacaggaaggatttaaatcagctttttgacacaccaggaatcatgactattgctcaaacagacctcaatgaatttacaattgagggtaagtattttgataagctgcatgaagatatacagaagtcgtggaacaattcgatatttactcctgttgagtttacaaatgtgatgagagctggtgtcattctggatgttcatgagtttttaacggagcatatatcgtataatgagctgtttaatgtctttgataacaagatgcccctagacttatttaaaggacattatgataaagggaatagggcaataaccatccttagtggattaacctggatcaatgagcggatgaagcagttagatgatctaattgaaagtggaaacactgaagttaaagaaacaactgtctataaagcgaagaatcgccgtagagaggatttattcaagccgaggaagctggagaacaaggaatcgaaaaagacctcgtatatggaggcactgaagagactaaaacgttaattttaaagggaagctgcctattatggtggcttttttattttgatttttaatgaccccccgggtgatcgttagctataaaagtgcttatcgtaaatgaagatcagaaagggttatttagttgatatagcaatgttttagggctgtcaaaggggataataggtgttttgtgatcgtaaaacgtagacaggagagaggaaaagtggttgtttatttaaaaatctgatgaaaaaggggagaataaggggtggaaaaacattgatattataggcttttacgatagcgattacgatgtgaaaataggctgaaaaatgggaaagtgaaaaaataagtttggtgtggaaatggaagtgctaggggtacatttgttcctattttttggcctttagatgttaatataccccctatatattggtatttaattccctatataagatacgttatgtagggtttttatgatttaggtgataaatttgcacagctaacacaatttcaaatgaaaaacaatatatatttttgaaaaaataattaagcggtcaacttaaaagtgaatacccattcattaaaataatcgtgtatataacgaaaggaaacaaatcgaagtgttatctatacaattcctcatctaactacacacctattttatattcatccttaatgttcatcttttcccatcctcattacattgcatccaccataaactatcctcagcttacctaatcatctctatccgtttccttcaccatacatcatatatccatcctatacacactaagcacacatcatcagaagcattctaatccacctagaatcaattttaatttaatcatagtatcattggtatccaatccacatacacgccttatacagcctataaatagccatgaataatagtgccaaaataatttaaaaaaatccattttaagagtaaaaataaaatgactttgaaagggaaatgtgctataatagagttataggaaaggaggtgtacatagtgcttgagaaagtgggtataacaattgctttccttattcctatcacggttttaatcatcaactgtttaacgatagctgagaagattcaaaacctgatgaagaataagaaaagcaaaaagcgtacacgcaagcgcctccgtagcaagagacaacgcaaacgtatacgcagataacacgctaaaggggaattaatcccctttagtcactacccatattataacatggacaagcacattgtaaacatgaaacgattctcattatggtttacgaacataacatttgttgttttattcttgttgtttctgttcatcaaagattatttcagcagcggaatacagtcgctgattacggctatcttcatagtaacgtgtatcattgtcattttgtcatggatcatttattttactttacgtaagaggttaaataaataaagtttgtggttttctggatattgatttacaaaaaaagatcaaaaagatattgatcatttaaagtgatcatgatataataaagttacaagttaagaggaaaaatacaatgtatataggaggataagaatatgattacagaagatagaatttttgaaatagaagaggaagagacaattgagggatataaagttagacgtgtgaacatgtcagaattagaaatcattgatagagaaaaaattgtatttaagggggaagaggcagaagtagctgaacaccttaactcactactcttttaaatatccattttaaaactctagccgatgcttattagaggtgagcgggataggaaacgaatccttgagggtatacagtatctttccgcgaatgtagaaagtgaccaccgatacaatgataagaaattctctggtcttgaaagacgtattcatgatcttgaagaaagaatcaacaattgaatttcatacatgagaaggagcggtaaaacatttatccgttcctttatttttaatattaaagggggaagtctacacttattatgaataaaattaaaataattgattcggttatggggagcggtaaaacatctgcagcgattaacaaaatgaattctgctggtaaagaagaaacctttatattcatcacaccttatttaaatgaagttgagcgcataaagaaaagcataaagtccaaacaatttttcgaacctaaagtaaagaagaaaggtgataaaacacaatataagtttgaatcctttcacgaactcttatcacaaaataaaaacattgtggcaactcataacctttttaaaaacgcaaacgacgagacaaaggaacttatacttgcaggcaattacacactgatattagatgaagtcatggaagtagtggaacaattacaggtaaagaaacatgatctaacaacactgtttgattccaatctgatttatattgaaaacggttttgtcaaatggaatgaagaaaaaaaagactatgaaacacgatacgatgacattcgagatatggcgttaaataacaatctaatgtatttcaaagacaatatattgatttggaactttccagccgatgtattccagttattcaaggaagtttacatacttacatatatgtttgatgctcaaatacaaaaatattactacgatctgaacaacattaagtatcaaaagtacagttcagcttacatggatggacagtatagcttcattgatcaccgtcctgattatgaaaggagctttaaaaaagagttaagaaacaaaataaaaatatatgaaggaaatctaaacacaataggacaactggagttttcactgtcttctaattggtataaaaataaatcaccttacaccatcaaaaaggtgaagaacaatgtattcaattactttaataatattgttaagtcgtcaagtgatgaagctatgtggacgacttattcagaccataagaacagaataaagggcaatgggtatacaaaggggtttgtctcatgtaatgcacgtgctacaaacgagtttaagcataagaaacacttagcatatacaataaacagatatacgaatactgttctgtataattattttaaagaaaagtacagtattacaatagaccaggacgcatttgcattgtctgagttagtgcaatgggtatggaggtcagctattagggatggagaagaaataactttgtacataccttctctaagaatgaggaagctgctcacaaactggctcgatacctgataaagaggacaaacctcttaaacttaaaaaataagccagtcatatcaacggttttagagcctaagtcttaaggagaaccagaaaaataattaaataaaaaataataaattcgtccgtaaagtgcctttacggccgtctcgtttcagcaagctgaacctcgataataggattttctttatttagaataaaaataaaatatctattgattattttaagtgatcatgttaaaattaaatcaagtcaaaggattacatacatttaagataaaaataaaatagttataaagaatggagaggttgaaaatgacagctgttttaagaattaatgaagagttaaatggaattgaactatattttgatagtaaaccagaacaagaggttttaactcatcttaaatcaaacggttttcgatactctggattcaaaaaatgttggtggagcaaacggacagaaaaatcaatgcaggtcgctaatggtgttactaaacaagaagtctcatcttctaaaacaatcacaaaaaccaaaaagaaagctaatggtgtaaatatgagtctgtgggatgcaacacaatggagtgaattagaagtaaataaggaacaagaagtaaaagaaatggcaaaggaaataagaaagcatttaagacaacgtctcccacaatgcaaattctctgttactactgggggtagctattcacatagcactattaacatcacaatcaaatcaagtccttatgaaaaaggctcagcttatttgactgcgatttatgattattgcaacagtcttttaaacaattatcgccattgctacagcccagcagatccttacactgactatgctggaagctacaatttctatggtcgtgtttcattagattgggaatacacagtgacagagcaaacagaagaaattaaagaagatatgacactgtttgattcaaagatggaagaattcgaagaagccgagaaagcgagaaaagaaaaagaatttcaggaatatttaaaagaacaagaaatcaaaaatgctgaatataagagacggcaagaagaaaagaaacaagccgaaaatatctatagcagcattgtagtaaaacaactgaatgaagatcaagagtattttgttattgatgcacagtttgccaacttaaacaaaaatcaagcacttgatcaatataaagacgaggttgctaaaggtgactacagacttgaaaatgtgaaaattacaaaagaagtgcatttcaatactgaagaagctttaaacaacttttctaacttgcttttaaatgattttgattttcttgcggaaaccggtggaagttttacggaagacaacaggatcaactcaatgattgattattacaatatggacgatttagaaaagaacacagttaaatggaatttatatggcgtaggagtgtactacggcgggaaattgcaatttattgtagacgctcaaggccattcttatgcaagatacgttggtttagtggacaatgcaaaaattgaaaagtcaatttttgataaacaagcgataaaagaaggagaattagacgagttaaaatatcaagcgggaaaaatagaagatctttctagctcagtcattgaagaattaaatatatttgcaacctggaataatgaagactgggacaaatataaagctttactcaaagaaaaattgaaattgaataatttaaatttgagtaaaaaaattatccaacaagcagatacagaggaattgaaaatttctttatacagaattctccatgaagttgacagcattcaagaacaatttaaaaatgctgatcttgaaaaaggtgaaaaatatactctgttttacatatctgatcttggatctttaattactgaaaaaataacgtatgacagttgccagtcaactaaatatgctcaatatgataatgcagtgaagttgacatacaagcctgaaaataaaagaaatttatattaccgacacttctattcagaattattgatgttcaaagggtggcactcgctgcccgaaactgtgttgaataatgtagaggttaaaccagatgggactaaaataattcacagtaagtactactcgtgtgacaaaagacaatttgacgaggttctaaattacttaaataataaaagcttcaaacctctaatcaacacatataaacctagtctataaaataagaggggatgagaaaacatctcattccctaaaaagggagaacaaaaaatgtttaaagataatccggatttttatccgacaccaccacagttaatccgaaaaatgacatcaaaaatagaatggaagcatattaagtctgttttagagccgtcagcaggtaaaggggatttggtagaagctattcacaatcaattcaaatacaccaagaactatagagggaattcgaaatatgatattgattcaattgaacaagatgaaaacttaaggcacatccttgaggggaaaagttatagagtgatagcagacgattttctgacgtttaacacttacaagaagtatgatttgatttttatgaatccaccttttagcagcggtgttaaacatttattaaaggcgattgaattaattgaaaagcaacaaagatccggccaaattgtttgcttactaaatgccgaaacattaaaaaatccgtattcaaatgacaggaaatttcttatacgtaagctagaggaaataaatgcagaagttgaatacattcaaaacgctttttcgaactcagagcgaaacacagaagttgaaacagcaataatttacataagcattgaaaaacaagaatatagcagcgttctaatagaagaattgaaaaaagatgagtcacatagaattaatgaggattataaagcaacacagttggtggactttataaaaggaattgtagaacaattcaactatgaaatcaaagcgggtttaaaattaatcaatgaatacaacagtttgaaacccttaatgctgcatagtttcaatgatgacagtactccaatattgaagctgctaattgataagaataccgaagaaaatgacatagagaatgcatatataaaacaaattagggcgaagtattggaatacgttatttaacaatgatcaatttatggggctcttcacaagcaatctgaaacaaaagtatttggagcacgttgaggaattaaaagattatgacttttctttgttcaatatctatacattgagaattcagatgagcaaagagatgacgcagggcgtggaagatacaatacttaacctttttgaagaatttagccacaagcattactatgatgaatcatcaaaaaatgtgcacttatataatgggtggaaaacaaataaatcatataaaattaataaaaaaataattattccactaaacgggtattgtagttggctcggtcactatagtccaacagactacaaggtcttagaaaagttgaaagatatcgaaaaagttttcaattaccttgacaacgggttaacagaagacataaacatagatgaatctctaaaactggctaagcattacggtgaaacgaaaaaaatagaattaaagtacttctatgtaactttctataaaaaagggacatgtcacattgagtttaaagacaaggaaatgcttaagaagttcaatatttttggcagccaaaagaaaaactggcttcctccttcgtatggcaaggtaaaatatcaggatatgacggcagaagaaaaagacgtaataaatgattttgagggggcacaatcttacagtgatacggtaaataacgcttcttattatatactggatacatcgaagcttctcttgcttacatcataacaaaatacacactttaagaataaaaataaaataagtattgattatttaaaatagtcatgatatacttaaatcaagttaaaacaacagcgaaagcatacatattttaagggtaaaaataaaataaaatgcatattttaaacagaatggagacattaagatgagtacatatcaagtagatttcaatcaattcagaggaagtatggaaacaacatgcgacctatataatttagataacaatacaacgcttcaaaccagcctttaccgtaatactaatagcctttgcattgaatataaggtaattcagcgtgatgataattcaaatagttttgcggagtacgatacacttgcccgtggttacattgaagtacctttgacttacaatcaatttaagaagcctgtaaaaaaagtttatctaaataaaataattaacgcactagattttattattaatcaatatcttattatagaagatacttctcaagaaattaacgaacgagttcaaatgaaagtgagtgcaactaaaataaatgaggaagatcaatctgactttacgaatgaaacctctaattcaccaattgatcaaattaggatggaaagatgggacagggaatatgacgagggagttaaatatttctttgataaatacgggaataaacgtataggggatattatttatattgatacacagcaagagcttgagcatttagaacacatagactgtgataatgtgataaggatttttgtagacaaagagcatgaaaataaaattaaagctattgtacttaaagatataaacaaacattatcaaagaagtggataaaacaacaattttatacaggagatgatgaagtaatggcagtaatgaaagaagtgtcaatagaagaatatgatttatttagaaaatggtatttaaagtataccaatagcagagtcctaaaaacaaaacagagggcagggtttacggctgttcttgacaagaaaacaaaagaaactgtttgtagcgaaagtcatcttatggggaaaagtagatacttaattaaacaaaattattatgatttatatgcagaggaggatgcggagtaatggctaaatgtaatgattgtggtaatgaacgttttttctacctagaggtatcggtgggagccaaacagcttattgatacaacaggtggagctaggaacggaaagatttatgatgtagactattcagattcaggtatagacaatatcttcaataaaggtagttatatttgtaaaaaatgcgaatcgaaagacgtacatcatgaggatggcgaaggtgattataaactctataataaatctgaataaaacagcagtttaataggaaaggggaattatatgcgtgaattagaattattgctcttagtgatgtgggcagaaaatggtgttaacgaagtttataagtataaaaatagaatcaaggcattccgtgatccgttggttaatatcgagttgattaatgacttgagttgcggaggtatgtttgctgacattgacgacgttgcaaaccacaagaatgcttcgtcagtagattataaagtaagtatcgcaaccttagttgaaaatagaagataataagataaatattttattaagaggaatgcctgtctaaataaaaacaccatttaattcgaaacgcttctttatcatcgcaaagaaaaaatgtaaaatccacctattggcatgagttgtcaatgatattgagacgtcattggggggagaaatttgaaaaataaacttgaaaaattgcttcttgaaaagggtgtatgtgaatttcatattaaggaaatgaaggacaccaaaaatataagtgagtatccatatgaattgtattatgatgaagtcggaaacagcgaaaaactatatcgggatgtcccgttaaaaaaaattaagagtttaggattcaggggaaccagtggtgtgtcttggtttgatcacgcgtgttataacggtacagataatattgacattggccgatgtgaaaaagcttttgaatacttaaaaaaacaaagtctagaagaatttcacacttattatcaacactcaccagtgaaattggttcattatgaagatgatgacttttatgctgtttacggtgatggaacacaccgtacaatttgggccaagataacagaagctccaacaatttatgctcaggtaactagagcaagaaagaatccttccttatataaatcatacttaagatttaaagaattagaatcacagattaataggtattttaaggagaatgaccttagctggggagttaaaaaaagccaatactattcagaaatcctttacaaaggtatgccagtagcactctattctatagatccgccttactcatttaaccgatcttcctacagtctcaatgatcaaaagttggatacatggaataaggaattaaatgaatttatgattgagtttgaagaaagttttcgctataggaaaatctttcgcaatgttatgaaggttacgcccggaaaattagagcacaaacttttttcttttattgaaaatttaagtgaaagttggtctacagctaatggaaaggcaagaattataaaacaaggattcgatatgtattgcatcgataaaaaaatcatttaagttactttaaaatatgtacaacagcatgagggatgacgaagaaactaaaggagaagtgatgaaaaagttaataattttatgtttgggtattatcggggtatttcttatagttcagtgtagtaaatttaacaacaatacaaaagtttatgtggatactcaattagaggtaaatcacgatgatgaaaatgaaagaaaaagttattatgacaatgattcaagccaagaaagtgaagcacttaatgacaaatatttaaacaaagaagagaataaggaatatgacatttacgcatatgatttaaaaactagggaaattcaatcacgtaatggacaacgtgaatatgtttatggaggcaacgtgatctctagcactcaagccgaaaaatatggttatcatacaacaccaattactaaggaaggagataaaacaatcaaattttggaggaacgatgtaaagtttgttcctgaaaagggtgagattgtcctggttagatttcctaagggtaatcataaaacatttgttgatattgagcttatgtataagccaacaggagagcctaatggagaatggaattggtgaacaaaaacactactttattttaaaacgggaatcgggctgcctacataagaacagcccttgcagttagctcgcaatccttgttttgactggtttgtttttcttgatattacgtaatttaagagcgggtttttccactattctgtacgaaagaaatgcggatgcagcagtaacagcaattagggctatgatcagcgggtaatcagacaatgttttattaattccagtgtataagaagatgttgatgatcaccatgtgccatatgaaaatccccatacttatatcgtctaaccggttcagctgtcgcaatatcttcggcccattgtaaccaaaccagacgagtgcatagctcagaggtacgaaccataaaaagctccataaggtgctgtttattgaactgagatgcagaaggtcaagtttatagaataaaaataaaattaccgaagacaaaaataaaacgatatgctgcggtaacttgctccatgccttagcccagaagatgcccaaagtgaaataaaacatctgcggcaggaaagaatgtaagtacaggttaccgaacacactgccaggcgcgaactttaaaattatgaaagagactaacacactgaaagcggaaacagcaaaagagcaaagaatcatttttgggaatccgaaacgtttataaaaccaataaattgcgggtaacaccaggtaaaagctaatctgaacaggaattgtccaaagtgaatcgttaaggcgacctgtgccgatgtgatggaatatgtcagggaagtattgagggtataacacaaaattgctaagaagccatgtccagtactctttagtagtgaatactgttaatgaaagagctcctagaacaattaacaggatggtggagacgatagcataggtgtatatagcgggtgcgatcctaataattcggctccaataaaaatcggttacattattacctttaagctgagatctctcataagaagtaaaaagaaaaaatgcacttagaaaaaagaagattgatatgccggtgtgaaatattgctttgctctctggggtataaccaaagacagaaatatttagatctcttgtagcatgaccaatcaacacacaaagagcagcaaacagcctgataacaaagaaacagttagaatgttttacgttcattaaaagaacctctttcctataccatatggcgaataagcagtaaggctgcctataagcagtgatgattatatcataaaaatggaagatttgttcttaaaaatgaactaaaataaatatttttgttcttaataaggtatatttgtgtgatgtagggaggtatagatacttataaatacacgtagatattcatagatacatgtatatctagctatatcaaggagaatgcagataaattaagaagcctctgcctgttctttcacctttatttccaatatagtataatttggaaaagggggagagggaatgaaaaagctaatctttttggctgtgatttgcattggttttatattgagttttaacacaccaagtgctgaggcgaagcttacattagactacaaaaatgtggattttcacatgagtgaggattcagagagtttttcaatggcagattattttgatcggaattttgatcgcacttggctcttctacaaattcacaattaacaatgctgaagggtgtactctaaatatgaaaatcagtaggataactcttgctggctgggtatttccacgtagtgagaagcagtttgtagggaactatgctgactatactgctacagatcgagtagagggagatgctaatcgtaatcatgtgttagagattacaaagaatccaggctgcggagatgtgtggattaaaggtatttatggatttgaacatgaagattcatttgattggtaagcttgatacatagtcaaggtatatccttgaccttttttatggatataatgataatttaaagtgatcatacataatgaatgcgaggtagtaacattgattaaatcaaatttaaagccaatattagacgaaaggaatatcagtattcgaaagctgtccaatgatattgatcatggttttaacacagtcaggaagctgtatcatgatgaaatggagcggtacccaagggatctgttggataaagtctgtacatatttagacattgagctgcatgagctgttgatttacaaaaaagattaaaaagatattgatcacttaaagtgatcatggtatactaaagttacaagaacagtaaatacttacaaattttataggtctacataaaatcgtactttcatagggaaaagaggaaaagaaatgttgccaacttctttaaaagcaaaagttcagcgaattttattaaaaggtagctttaaaaaatctgagagctctaaaagcagagtaaaaggactaagcaatatttcagcgggtttcacttttgagaagatgtttgacgacggttactgcctctattatacatgcggtaatatgactttccggggaatgccaaacgaaaaaaaggataatcaaacagaaaaaatgtatcacttcttattggatcagggtcttcaaaaaaatattgaattgacagagtttggaaataaaaaagtaatcttgttgaaagtggaataattgcgagacactttgaggagtagcataaatttgcactttacaacaaagggagagataaaatgagagaggaaattcaagtgttacttgaagaaattgaagaattagaaatggctttaagtaagtccgataacaatactgtttctgtggttcttcaagaggcaattgataaaagacgcaatgaaattggcgaactaaagccaaatgggtacgtcatagcagacgtagtccttaaagacggtaccgagttaaaacggtgcttagtttttactgtaacagatcgactagggtcacaagctgtaactgaattagttgaagcaagagaaatcttcgaaaaagataaagcggtttatttgcaacaggaatatgaggatggaaactttgcaggggatataggagtacacgaaatagcaacatacaaccttgaatatgaaaatggtgttaatgaataaaatcattctttcatcttaattaataaaggagagtacataatgtatagattcatatcagagctgaatttagacgactcgacaattcaaaggatggataaatcccaaagctttaaatacatcggtggtttttatatgtatgatccccagcaaatcgaatggccaatcccagaaggagaatcatcttcgctcagtgatttagcccatttaagttttaattcttatgactgtgaaaaccaaatgatcgcggatatgaaaagggaattcactgaagaaaagttgttaaatatttttaattctgagtgtccagaaacagcttttaatgacgctgcttcaagaatcattgaaaaatataattaaggtgggttttaattggctagagataaagaatgggttaaaataagcgaactttctgaagaagaaaaacaaagcttgactgccggtactgcagttctgctgcatgataattactataatgggtcgtcagaaaaagcttccttgataagaaaaaaaggttctcaaggaagactagaagacaagtattacgaattgaacggtcaaatggttagaattcttttcggaagcagaatcttaaaagtcccttcttctttattatctgttccagttgcaatcgacagggaacaggaagtcgaactaaatctttcaccagtccaaattgttaaagttatgaagtcattagaactgttactagacttagacaaggaagaatttaaatttaatcgagaagagattgtcctattattggagcagctaagtaagaatctagatagtaatggtattgatcctaacagagtaatgaacgagctgttttcaaggattgattaagttgaaatgaaaccagtcttttaaccagttatgtaagtcaggttgagtcaggaatacttttttgaagggttagatatcaaatgacgatgctaatagcagttaaattcgacaatagcatagtaatgactgctgacaaaagagtgactactacaaatagcttgggccgaattttaaaagtggaatcagatgaatataagaaaataaaaattattaataagaagtacgtaatttcttttgcaggtagaatgtttattgcagaaaaagcttttgattttattgatcaaaaaagcgatattttgaacagtaatattgatccactcttattttttagagaagcttttaattacggaaaatcatgttttgaagcatattattctggtattaacccactttccgtattttttgttggatatattaaaccagacgaaagaccacaattgttggggttttcatcagatgataattaccttggattagaaatcgattcaagtattaaaattaattctaactcccctgatcacgaagacatgcttataagcgaaactgttaattttatttcaacagaaatgtcaaaccgtcatgcctatcatgcaaatgaaagacttttagagatttattcggaggcaataaaaagaaccaatgatccaatgatcggaaaaacaacttactctgttatcttaacttctacaggtgccgaagaataccatcattaatgtaaaacagcacgtaaaaattataattaagtgaggagaatgtaaatgatcaaggtttatacaagaggtcataagataccaaaaaagattaaatcttgcatctctgaatgggattattggtcttggattgtagttaccaatattgcaaagaggaacaaggatgcgaaacgactaatagagaagattgaaactgatccagacaggattgcagaatataaaactgaagatggaattgaagtttatgtaagctacatgattccagtgaaatagaaaagagcattaaactaaatgctcttcttcataccacatctacgacactcacgtaaaaacacaccacttttcactgaactcttgaataaagcgtaatcacagttgtcacagcgaccatatttaacatcgggatactccttataatcatatacaactgttacatcgtagccattagtctcaaaatctttctcttccattaaatttcacctacacaaagtatttaacactactataataccagacgatgtatataaggagggttttaatttgattggaatagcatatttcttaatgctctggcttggtgtaggctttctgacaggatttaaggccttatttgttgatcaggtttatgatgaagagtttaagcaggaactgattgattcattttcaccaggtatggagcagaatatgattgaactgttctttaagaataaaataaatatcatggtgttttacatattaattggattgctgccactggccataaaaattgctggtctgctgaagaggagttagctatgcctgttatcgataccttttttgttattcaatttgaaaatgatgattacttcaagtcatttaaattagatggaagtggttataagacatctaagggacttcatggcgcttctaagttcattacaatgtcagaagctttaatgatagcaaacgagctgcgtacagagtttaatgtcacttctgccattagacaaatcgaagttattactaggtgatggggtgttcaggtgtactggattgaatggattgaggatggggagaagaaaagtattgttgtggacggctgggttgaatgggccacaatcctggaagacctttatcagcagcggtttgagtatgttgaatggaagcggctttaaaagtgttgacagaaataaaaatacaactgatgagacataagaacctgaaaagttactagggggcatttttttggacagcagaagtaagatgagatatatgccaattgaagattttccaaagaaagcttataaatacatggaagcgaaatggttgaaaaaattaatgagggacaagaaactttttgtaaatcaccttaataactatccagagtcaagcttaggtgcggatgttggagatgaccaagaaggtgtagcaaacagacatttaaacattaaaaaatataaaacaggagaccataatccacaccttcacaatgaactacaagaatggtttcctgactcaatagttagacttgaagatgtgtcatttcaaacctcaataataaataaaaatttttatgtttattgtttaactttcaattatgataaaaatattatgagaaagtttggaggttcagtaatggtaattaatgattttccaagtttcgcatattgggtacacaataaaatgaaaaaaagaaattgtgccttatatgctgcgaataattgcatatatagagattcaaggagcattacttttaatgaggaaaacactgatttttatttggtgccaggccttattaaagatagtaagcattctgaacaagaagagtttagatttctttggaggaaaaacgataattctttaataaacagaccaattaatgatctttatgtaccagaagcattaaagttttgctcctttgaaattaatgaataaaactttatattgtttttatggtttacatactacgttcaattatacgtattgaatttgcaaactttttaaatgtatttataatcttctttaaggagttgatttaaatgaattgggtatcttacccctcaattttacactatgctaatgatggtattacagtaaccttcccagaccttcctggttgtataacttgtggagaaaatgatacagaagcaattagcatggctaaagaagctttaggtcttcatttatacgggttggaaatggacggagagaagtatcctagtccctcaccgttttcggaaattaagacaggggaaaacgaagttgtgtgtttgattgatgtgcctatgcatgcatttcgtgatgagtataggcgtaaatcaattaagaaaacattaactattccggcttggttaaatgaagtggctgaagaaaagaacattaatttttcccaggtgctgcaggatgcattaaaagataaactaggactaaatatctttaaggcacagtaaggattcttattgtgccggttcatataaaatacgaattttaaacagataagggttccttaaaaaataattagaataaaaataaaataaatacttgtaattctgacaactctaatgtatattataaacaaagggaacattagttgggaaggggtgtagtaaccaatgaatcttaagcagatgattaagaatgaatgtgaaaaagacaaccagctcgcagcgaaactctcaaaaatagcagggtacaaaaaggttaatggtttttacaaattcatcaacaccccagagaaagaaatggacaacttaggcggtttaattaatattgttaaaagcttgtttcctgataatgaggagcagcttctaagtgattacttcttatcactggatcccaacaaaaaatgtgccagacaatctgttgaatactcagatattaatcaatgggatacgttaacagacaagatagtgtcgaggctatctagctcaaaaaacctagcaagtcaagaatggggcaatatatacagtatacatagaagattgagcgaaagtaagataagtttaactgatgcaataagagcaaccggaaagtgcaaaacagatgaaatgttatttttctcaaatgctatgctgatgtatgagtatttgaaggtaggcgaatttggattgatgaaaagcacattatcacttctcaatttcaacgacttacccgaaggctttgtgaaagattgctatatgaatagaatttcattattaaatgcaaatatttatttaaatgataatgaaattgaaaaatctaggtattattcagaacaagttattcaaaattcaaatataaatcgactaaaagtatttgggcatctaacatatgggaacacattaatttttgaaagctactctaaagccaaagagcagtatcttaaaggattggaatttgctcgtgataatgaacatcataaatataagctgcgattagctctttgctttttaagcaacctatggaataaggataataaatggcttgacttcgacactgataatatccctgataagattgaggtagcatattactatactaataataaggaatttaataaagcagagaaagtaataaatgagcttgagaatatggaattgtacgaatatgattctgggattctagattacattaaggggattctataccaaaataagaattatttttatgaaagcactgcaaagttgaaaaaatctggtgataaattatttatcaatcttccattagcggagctaaggaaaatgggctgtgacgaaaaactacttgaattaatcatggtctaaaattgaaggggggtgaattaaatgaaaaatattattcttggaatagtaatcttgttagcaatggctgttggatttgttgccggacagcaatcaattgagacagcatcggtagaccatgtagaccagcctgtaaaagttgcatcaccaagccgcggggcttaacttcaaagataatacataacttggctagacgtttgatccactggatcaggcgtcttttctaattttaagagaatgttccagaaattcataatataaaaaacaagaacatgggggaattaaaatgaaaaagcatttcggacaagtactttcttatgaggatatggctaaggggtacatggaaatgggagatattaatttagaaatttcccaggaagataatcatcttgaaaatgaagcagaaatggttagatcaaaatataaagcaaaggtatcctaatgaagattaaagacaaatcagcagacattttaacacatacataggggatgtgttatttgtcttgaataaaaataaaataaattgttgcatattattctagcaacatatataatgaagttacaagatgaacgttgttgggagatgaaacaatggaaacaaccagtgccactcaaaaggaagagttgaagattacatcattaagacaatatcaatacataaaacaactaaagaacttcacacgagtcaatctccacctagaggatccagatgtgtttacacctaataatgtaactacaatgagaaaaaatcataaagaatacaacctcattaaagaacaaaaaaattctataaaatgtatttaaggagtaaaaataaaatgaataataaatattatacagaagaaaacaaggctaaagtttggaaaaagcatatgatcgttttaaagtttctagagcagcctgagatagcagtagcttataatgagttcctacgaagagaagcgacaagtgatgaatgggttgggttcgaagaggagctttatgaggaattgacggggatgccaattataaacgtctgtaaggacgagagggtaaatgtcctaaactgaattttattataggataaaaataaattaggtgtgataaaatgaatgcagacatcttaattaacgctcttaaagaatacgacatgttaaagcaaatggaaatctgtaacgccaatataatgctgctgagtaatattcaaggtgagaatgaatggattgttgcgtggaaagaatttgatcaatacttaatgaaaaaaatgatatgaggtgtcattatggaagctcaaaagaaagcgtcaacactaagggattattcaatatacaataacataaataggtggtttgatgaattagatttaagaaacagggatcgagaaactggagaaattgaaaagtctaatactagagccacgtatgaaaggcatataagagagtttttcaaccactatgctgccaaggatattgaatatttaactgagagtgacctggcgattaagaagagtgacctgtatgattatcgaacccatttggctaaaaataaaagcaactccaattcaacaattaacaataagattgccgcactgaaaagtatgattaagtaccttgaatctgaacatgagtgtgatgcatctgtatttaattttagacctcttccaacagaaaagaacccagcaggctcttttgaaggaatatctgaagctgatgaatttgctgaggcagcgtatgttactgagcgtcagaacagattaatgaaaaagatgtttattttgtttagtgcacgtactggtggacgtaaatcagaggtacttagagttgggtgggatgatattacttattcagaaaagcaccaatgctatctcgtcaactttaaaaaaactaagcaaaaaaaggctagaccagttgggatttccactgctttttatgaagagttattgctgttaaagcaagagtatggggaacatgagcttttatttcataagttaacagttgattcaatacaggatatgtggaatcgcgtatgtagagttatgggcattcccaaagaaagaaagataactccgcatagtttacgcaatactgcaacaaacttttcttacagcattaatggtgatattaaaaaagtggcagcgttctctggccacagcaatatcaatactttaaatgaccattatttagtcaatgaaagggattattctcaagatccaggggttttggttgatcaaaaagaagacatgtcctttttagatgatgttaccttagagcaatataaagaattctttttaaaatcagacatgtatatacagaataaacttaaaatgtttttgaacaagtgatacaaataatcatataaaagctttacttgcttatgaaaataatgataaatttaatatgattatgtgaggtgataatgtgtctgaagttttgttgacaacggataaactttataagttaaaaactgaaatagagaaaaatcttaatgatattaaaaatgatcccaatatggtgaaggaattaaaagccacaatggcggacaaatacaaggcactccctggttatatccaagaaattttaaataataatgataacaacgtacagcgtttaaacgaaaaagaagtgtacattgtttcaaaagagttgtattcaattcttgggacgcaagctttagatccgtcaaattattttccaaccagattggcaaaagagcttgaaggtgggagagtattcgccggtgaagaagtagttaagctcccctacaagtttaaaaatgtgattaaaattaaagaggataactatgtcacttccattactgccaaagaactgagtgagttatataatagctccatcctgcagtacaattacaacactcagcgagaaggaaagtacattaagggcagccttattcctgtacctaaaacaaaccctaaatcagttgatgagatcaaagaattgtttattaaaggcgatttaattgtatcaatgttaacttttaacgctcgtcttggaacatctgatggtgatgaagaagttgaatatgattcaagcgaccaaaccctcactgtaacacgaggaaccttattagatgctcttgatggatatcatcgaatttcaggtattgttaaggccattgctgaagtccctgaattagatcaaccattcattttaaatgtgctcaattacgatgaagaaaaggctaaggttcactttgctcaaatgaatacaattaacccagttgaaaaatccagaattgaagaattgggtcaaaaacggtattcttcaaccgttgtcgagcagctgaaatttaaaagtgaacttaaaaataaaataagcccacaaagtgaaattgctattgatagcaattttcttgtaacatattatactttatccgaagctatagacgatgtatttgagttgaaatctcgaaaagatgcgttgaaaattgcgaaatacttggtagacttttttgataaccttttttatgcattcccagacgaatttcttgaagatgatttatcgtccattagaaagcaatcatacattaatcataacgtaatgttttacggttatgtttatttggccaagaagatgaaggaaaacaatgtagaactaaacaagcttgaaaatatccttaatacgattgactttagtaaaagcggaagagtgtttgaagaattaggaagacaaaataatgagaatcaactaaagaatattatgaagaagaaacttaagcgaatgttttatgatgaaattgctgttgtttaaagcctaaaggagaatttaatatgagtgaaatatataatgctgaattgaaggaaaagtttttagagaaatacgaaagtgaagcaacaagaaaccattattggctaaggctaagggatttctcagctacagaaaaaatacttcaaaaagacatatttaatttttctttggaagagctgcgtacgttatttttagatttagatagcaaatctatagattcactaagaggagcaagagctgtaattggacaatacacaacctgggcaatggaaaatggcttggcaaacagtaacatcaacaaagtgtatcagatacaggatggtgacttaaagcagtttatagataaaaacaaaaaaacactattcaccaataaagaagtagaagagtatgttgattttatggttaatgatcaggataaagcgatgatacaggctatttatgaaggcatagatggctatcagcattcagagttactgaatttaacaggtgacgatttacttgatgataacaaggtaaagctgatagatgataaacacggtgtaagaataattactgtaagcgataaatgttatgagttgcttaagcgtgctaatgatcaaacaacttatcatcttagcaatggttcgccagatagtggtcttaaaaacaaatttgctacattagttaaaagcaaaaacatttttaggctaaaatacaagagttctaatcagagtatgaaagctgacaagtttttagttcaccgatcttttagccagtttcaaaaatttttagaagaacccttcttttcacctaagaaccttatcaactcaggaaagctcaacatggcgtatgagatatacaaagagaagggtgaattaaaagtacctgattataaaaaaataactcgacaatacgggtttctgaatgaagacgcggagtttaattcacaatcactgaggaaagtagtgaatatggataacttagaaaaatattgtatcaagtctgaagtaattgagactaattcttaatccctgttgcagggattatctttacataacttttagagtaaaaataaaacatgtgcggataaactcgtgatattttttcgaaaaatatcaggattttgttcacatttttcagaattcgacaaagttagacagagacaaatttgtacatatgcagtaaaatagttctataccctaaaaagggtacaaggaggttcgctaggccaaactccctagcgataaagtcaatgtttgattttccattcatagagatcttcaattgaacagttaagggcaatagcaatgattttcgctgtttttatattcatagaaggtctaaagccgtttgcatagtcacttaatctttgcgtactaatgcctgttcgctttgaaagttctcctaatgacattcctttactttcgaggagaatggaaatcaaacattgtccgatttcaacctcaagcatcggacaacctcctgttatagtattgcttatcatactatatcaattctttccaagtttttaaatgaaagaaaaaagatttgccactaactaggtaaaaggttataattaagtcaacaaaaagggaacataagttcggttaattactaccagagagagggaaacgtatgtcagaaaaggattattttattcaaggggagctgtgcattcctttttttggcaggataaaagccaagaatgaagaggaagcactcttgttcgcatatcaatcaattaaaaagaaattaagaaacaaaacagggaaaatggggtttcttcaaaaagatcaagaaaaatatgaggcactatttgatgtagacatcatgtgtacagaggatgctgaaataacaacctcttatgccgaagaaatagacgattcgtttgaaaatgaaggctataaatcttctcaactgttatcaataaaataaaagcacatacacatcttgtcagtcatcatgagacataaaaaattggtgactttttagtcagactggagcatacaatggattttaatcttgaaattgacttgaaagacattatgagatcagtttccatgagtgttggttctaagaacatacaaagtggagagtactacatagacattatctttaaaaacaatggggattgtttgaggattagaatggatcatgcttcagttttagaatttagagacaaaataaatgaaactctttggaaactggacggcatgaagacgtttatgaagacagcagctttacagtatgagtaaagctgatttttttaaaattatttagaataaaaataaaataagtatttacaacatatggttgaggttatataatcgaattagaattaggaaaggagatagctttaattattgattaatgaaccaactaataatcaaataagaaccatggttttaaagaaatatgcaaagctcttagcgtcatgtgaaaggtcattgcgcagcatagagaataacgaaataagaatggcaattggagacctagattttgttaaagacaatttagaggaaatacaatacatactccgtgatgttgtgaatcagcatgaatgtattaagagtaaaaataaaatttaagttttatagagattaagataagggggaataacatgggtgcattaatcgctaagcaaccgaatggacggtactgccgatttagttcagtggtagactgtccaacgcacataaatatgacgcgtgaagactatttaaataattttactgggacaacaaaaggaagggaagatgctgaagatacacttgcaaattatctccggccgtttcacgaagttataaagtggtacacaccgctgaacatgagcgaaaaagagtttgtggaggcgttaaaagaaatgtgtgacgaaaacccaaaggaggcgcgggaattgtgaacacagcatacagggtgtgggacggcgagcagatgcattattgggatgatgaagggttgagccttaccatcaaaaataacggtgattggactttgaaacgtttatacacagatgttttggttcccgttgtagacagcacgaatagaaacgcggctctcatgtggggcacagggttgaaggataaaaacgaaaaaatgatttacgagaaggacgtcataaagtttaaatctgtctattgcgaaaacaagattataaaagcagtggtcaagtttagagattctcttgggtcgtttgtattcaataggggagacgatcaagacttttggagaatggacgtatccctaagtgaaatcgaagtcatcggagacatttatcaaaatcctgagttattggagggcgcggagtgaatgctgaagtaaagcgtgttgaatataagctgtggtacgaagttaagtacggatggaagcatctcagtttcggcgccaatgatgataaaactgcattggaatacgcagaggaatacgcaaaaaataactacctcataaattataaggtggaaaaaataacgaatgagagattgttttggactgaggagggcgcggaatgagtaagaggtctaccctgttattaaggaatagtgtgaaagcaggacaaagagaaaaattcattacaaatggcattccctatgatgaacttgatacacaaatgatcaatttaattgatattttgaatttcatgattggattgaaaacacgccactgttgttttggacataaaccatatgaggaaattcaagtaatgtttgaagaagaagtaaatttaaaagaagatcaaattctagagttagcggaattagcagggagagaatggaaaggtcttcagttaagctttagcaaatgggcgagattttctccattgatgtttaattggtcattggtactatcgaaaagatttagagatccagaagatccaaataaaaaccgttagctaagatcagttgaagaattctttgagagctatgctgcaaagaagtgattaaaagatgcattttaaacaaataaaaatcagaaaggttgatagaatttgagaacattagtgttattaagaggctgcccaggagtggggaaatcaacttggatcaaagataatggacttgagcaatacacactttctgcggacaacattaggctactgtttcagtcacctgtgttaaacaaaagtggaaaatatgaaatctctccgaaacacgataacaaagtgtgggatttattaatgaaattgcttgaagacaggatggatcgcggcgaattcacaattgtcgatgcaactcattcaaaacaaagtatgatttcaagatataagccactagctcaaaaatatagataccgtgtacatgtagttgatttttctgatgttgatgttcggagaatcttaaaaagaaataaaatgagggctgaacataaacatgttcctgagagtagtattctaaatatttatgaaagaatgacaacagaaaaagtgccatcttgggtaactgttctaaaaccagatgagttcgaaaacacgatgacttataagccaagatgttttgacgattataaaaagatccatatttttggagatattcatggctgcaatactgtgcttcaagagtacttaaacggtgatttaaatgaaaatgaactatacatctttgtaggagatcttatcgacagaggtattgaaaatgcacagctgttagaattcatgatcaaaattaaagattataaaaatgtgattattctggaaggaaatcacgatagatatatcaatatgtatgggaatgatgaagaaacacctagcaccacatttaacaacaaaactaaacctgaaatcgaacaatccaacattgataaaaaagacattagacagttggccaggaagtttcatcagttagcttactttacatataaaaacactacatacattgtaactcatggaggagtttcaaccgtacctgaaaatctcttgatgaccgcaacaacacaattcatcaatggagttggagattattcagacgatattgattatgaatttgcaaataatactgcaggtcaaaatgttgtacagattcatggacatagaaacatgtaccgtctgcctgtgttagcagcagaaagatcatataacttagaagggcaagtggaaagaggaggtcatcttagagtcgttacactgtctgagaacggaattgaaacgcatgaagtgaagaataaagtctttaaacaaatttcaagtgaagtacagagtaacagtgcaactgttggaacaattgatgaattgatttcacacttacgtggtcatgaatatgtgcaagagaataagatgccaaacaatatctcttcatttaattttacaaagcaagcatttagaaagaaaaagtgggatgaaacaaatattaaggcaaggggattgtttattaatactgagagcaatgaaattgtaagcagaagctatgataagttctttaacattggggaacggtctgaaacaagaatgcatcatctcgtggatacaatgaagtttccagtaacagtcttcgataaggcgaatggatatttaggaactgtagggtatgactctttgtcagatcagttggtattcacttctaaatcctttacgtctcaattaacaagtgaacatgcaaaatgggttgaagatatgtttttcaagtcctttgatgaatttaaagtaaatatcattaaagattatctgaagctaaataatgtttcattcgtttttgaagtaacacttccagaaaaagatccgcatatcattgaatacagtaaagacaaactagtcctattagacatcgtaaaaaggcaaatgacgtatgaaaaactcccttatagtgaagtgaaggcagttgcagagagtctttccattgagtgcaaaaatcaagttgcagagtttagtaactggacagatttctatagatggtatctggacgtgtcacaagacttttcaattgaggaagagggttatgtaattgaagatgatgccggcttcatgacaaaacttaagctcccttactataacttttggaaacaaatgaggggattaaagcataagatcagcaacaaacatgagcatacggttaatacaggaagcctttacactcctttgcataatagattttttgcatgggctaagacaaaggacagaggatatctaaagtcaacctccattatcaagttgagaaatgattttgaaaaagaaactgtggtaatggaatccagatgaattcaagataaaagtaaaattttaaagagaaaggttgatgggaagatgaaatttgcaccaatggataaagttaaatttaaaacagctagccatttcaacaaacttcgaacatttaaaaaaagagttcctgaatttgacgatcctttactcggtgattgctgggaatttgaagaagatgggttaaaacaatttgattgggaggagaattacgaatttgtcgctaggcccaaacattttaattgggattaaaaataggatctaattgagtttttaatgaaaaggagctgttataaagtgaaagatatccgagttgtttatgacagaaacaaaactttagaagcggtcgttgtccagtttggagctatatgtgtgagctagtagaatcgcaattaattgatgaagaaactaaagaattcgacgtacttaatgatgaatatcaaggaatttggaaatatgaaaaagggcaacactgcgaagtcgaaatttatgatggggtagacaagtgggtttgtcaagcattattaaactgaataaaaagtaaaatgttcttcagatgatataaaggaggggaaataaagatgagggaatcacaattaagggaagaaaatgaaaatttgaaaaggcaagtagatcatatgaaagaagtctataaagaaaatatgcatcttcatatggcagtaagacaaggtgaacagttaaaagctaacctacaagcttatttacgacaagatgaccgagtatatagtccccatttcattacaccaaaacaaaaacaatatatcgcaaatttgttcaaaaaacatggcttgtctccactcagtaaagcaaaacgaaaaatagttaggcgttttaatgggggcggtctgctttcagagcacgaagcacatcaaattatacaaatgtatgaaagaaagtaatgttaatcttgacttggctggttcaactgtaaacaagaaggaaagagatttttaattgtagttatacagtcacaataaaaagactgttttaaagaaagggtgagaaccgatagtcactttcaaaaaacttagtgatcctgaatatattaagcagatggaaattgaaagaaatgaacgtgagcggatatatcaaaaaaaggagactttaagaaagaaaacggtgtgcttcactggtcataggccgaacaaattgggtggatacgatatgaaaaatccaacaatgcttaaactcaaagataagctgcttgaagtaattgaagaattaatcactaaggaaaacaagtccagtttcataactggtggagtgttaggaactgatcaggctgcttgctggtgtgtacatattctaaagaagaaatacccacatattaaaaacataattgcaacacctttcaaagaacaagataaagtgtggtctgaagaacaaaaaatgtggtacaaacgtatgcttgatgtggcagatgagattattaatgttgaagaattagataaatataaagttagtggagctgtaccaggtgagttttcaccggctaaaatgcaaaaacgaaatgaatacatgattgatcacagtgaagcaatagtagctgtttatgacggaagtataagtgggacaaggaactgtctgaattacgctaggaaaacatacttaggacatcaaatttggaggctgcatccgaaatgtgattttgaattggatataagctatacgcctgaatgaggagggatataacatgagtgaatttaaaattgtgaatttagatggagttaattggggatcgcataatgacgacacgttagatttcaaagaattgattacaggaggaacgattgcagtaggcgacgttgttaaagttgaaggacggggcgattgcccacttcctctaagggagaaccaactttgcataacatttaacaaagaaaatgagttgtttcttgaagaaccattcacccaagaagaatgcaaatcattattcggatcagattttagctactaagcaattactttaaaaggattatttcaatgaaatgaggtgggaatttgagtgagaactataaagatccgagacaagttgcgcttgagcttgtaaagaaagcaagtgatcagattcgctataccaatgatgatgaatttacatttgaagtggttgataaattggaggaaattgaggatatgcttaagaaagatattgataaagaaaagaagaattcattgaaaaattagttgaaaggatgtcgttagcataggatacatcaaatacataattgatacagcctggtttaacttagtttggtttaagtggcatcttggagcggatataagcatatttgatggctgcggatggaatacatataaatatttaaagggtaaaaataaaataagtggaggttataaagatgataaagaggaatctgcttagcaaccacgttgatgagattattggtgaatattacgctgctaaaggatattcagtccatagcattgaccgccaggaaaatggacaactgatcgttgttacagagcgagtagcagaggagaaggaaccggcacaagtcgatattgcgtttgattttgtacatagaagaccacataagaagaagtatttagcttaaaaacggcaaagagtcaaagctctttaccatcaggtgatttctttaaccgattcgcaatgtacttcattacgtttactgcaatcgacactaatgcaataatcaatgctatttcaaataagaggatgtatccaaaattcacattaagcttttcaaagtaatcgctggtaatagagaggattttataaatccctagcataaaaacaataaaggaaacacctaaaattacaagtgactttatagaataatctttagtatgttcaaaattatagataattattgatacaaataacaaacccgtagcaatcttttgggttagcgaatcatcggccgaaaatgattgcactactatgctgatgattaatccagcaataccgattgttttattcaaggaatcacccactcgtatgtaagttaggtatgagtttaccaattaaaggggattttctcaaggcaatacacattaaagttaaattaaaatgctttttaagaaaggggtggaaacatgcttggttatcagaaagggcagcaagtaagatggcatgaaaatggggaaatgggaattatattgtgggtgacaaatcaaggctctgtaggtgttaaatggagctcgggtgaatacggtgaatacaattataaagttgatgagttattactgttaacagattagtatcttacccaaaagtgtgaacgcatgacagcaagaaaaaggtttagtctacataaaatcgtgattttaaacagaataggaggaaacgaatgaatcaagatattcagtttttaaaagaacttcagcaagagttgaaaaatcaagacaacgacggacaagctgcaccacgtttctggacagttggtgattatgaatgggtcgaagctcgagaggaaaatgcagaacggtattctgtatacctgccatatattgcagaagcatatgttttagatgattatttggaagatttaaaagaagatagtgagctatctaaggaagcattaacagagttgaaaaatgacgactttgatgatcctattgagtggattcaaaaatacattgatgaagaagcagaattaattccagaaagaaaggttcatattgtacggccggatacaatgtttttgaccaaagaagaagcgaagagccacatcaatttgaacaagcatcactacacttcagaagctcatacttatgcaatgacagcttggagggcaccaaaagtagagcagttgcttaacatacttgaaacgtttgattggaattcaattaaagacagtcaatacaatctataaggggtgggaaaatgaatacatatgtagttacaaaagaaactgaaaattatctatatgaaataaataaacaaattgtttatgccggtaataataaagatgctgcctttggtcataaacctgaaacaagtgagagcagactaattttagacgtctggtttaatggcctaattgttaaatcattcagcagaaatcctaatggaaactggcgcgttttatttgataaaatggcaatcgcgaagaaagaagttgaagactacagcagaaaattaaacaaggcacaagagcttgtagagatgatagagagagctgaacaagtctagataaaagataatttttaatcagttattaggaggaaacgaaatgaacgtaaatattaaacggttatcaccggacgcacagattccggcttatgcgcacgcaacggacgccggcttcgatttagtggcgtcagaggacgttattatcgaaccgggctgggcagagcttgtgccgacgggtttggcgttcgagattccggagggatacgaaatgcaaatccgtccgcgatcaggcattacgctgaatactagactgcgtgtgcaactcggaacagttgattcgggctatcgaggagaggtcggagtaatcgtcgacaatataaatcgttatacagatattgaaaaggactttcttttcgatatcagagataaaatcgtcagtgctctcgattacctcggagcttgggatcattttgcgaaaggttcgtacatcatccgaaaaggcgatcgcatcgcgcaagccgttatcaagccggtcgagcaggtggtatttacggaagtcattacgctcggcgatagcgatcagaatacgagtcagttaatttaaagtctgaatcgacgcttttcctcaaagtcttcgggatactcattctgctttgacttggacttgaatacaaaccaaattatagcacctagtgaataatccatgactttatcaaaaatccaagttgtgaagagatccataagaattttcattgcatttcacctcccgagacaaaaatgtcctatctctcttagatggcatgtgtatgacacgcatctattaataaaagagtgaaaagtaatatgaaaatcaaaaaagaattgaaaaaaataaaaaagaggtgaaaaaatgatcaaacaagaacgagaagattatataagcaggcttgatgaatatggattgacagaagaaggggatgagggaatgacgaatattttgaatgattttgtaggctatgacatttggtgattatttatgaataaaaataaaatagttatttatagaagggaagggcgcagatggcaacagcagagcaattgaaacgaatgaacgacataaacgatttgatcaagcttatcgcaagtattgatagatgtactttctactgtaagtcaaagaatcggatagcgtatttcagatttaagaaaaaactgttcttcgttgatgattacacgggcgctgacgtttacccatatgaattgggatacgggcgtgcaaatggtttttcgcatgggggcaacatgtggcaactagtcaacagcttcagaaaattcatcataacagggaaatacggcgagctgagggattataaagaaatatgggcttacagctatgaaggttgtatgaaaatccgtcagaaggcgaaggagatcggtttcattgaaagtgttgattacccctacagctttgctgaatgggcaagttaaactaattgattcatgtactaaattttcatcaaaattaattaactttgagctaaggaattatgtaacggagagattagactctccaggattcaaaggaaggtatgcggagtttaccatgcttagtcttaaatctgtgcttaaccttacataagatcggttctacaaatatatattcgtcagtttcagactttacatgtttcatagagtggaatttacttcgttctgcgttcggcatgaattccattattccggctgcagtaccatcaggataagacagaagaaattttatatcctctttggtgtagccggtgataagcacatctgtgtaatcataattaatcactttcagccagctatgggaacgtttattgatttcataaggggagttagctttctttagtacgattccttcaagatgcttttctttggccagattaaagtaagctaatccgtttccttgtagaccttcgattacaaatacattatcatggtcaaggtttaggtctgaaagcatactcttacgttcagtgagtggcttagtagcgattgaatgaccatcaatataaactacatcgaatacacagtaaaccaccttatgagctgatttcttagacataaagcgttccataacagcttcgaaatctggagcaccgcctggggcagctacaatgatttcaccatctaaaacagttccattgggtatattaagatctaacagttctgggaacttgcttgttacttcgttgttgtgacgagtataaagctttatctgatcattaaacttggagaggatcagtctaattccatcaaacttcagctcggtaatataatcatcgtcatcaaatggttctttgattgaatgcaataacattggcgatacaaacaaaatatcacctcctacttagaacataatagctaagcgaaggtgatatataaagcaaaatgactgtggtacttaatgggattcaatcagttccggtgagttgtttttaggcgagttaactaaggatgaaacttgataagcttccatgtcatcagcatcatacggaagcagtaagctttgaagataatcaggatcggtgtttttggggtttagccattccttttcgttcttgtcagtaagaatgaccggcatccgatcatggatgtcctccatcaactcattgggttttgtagtaatgattgtgcaggtatatagcggattgccttctggcgtattccacttttcatataagccggcaaatgcaaagaggttggatgatttaagtttaatcctcataggaaccttagtctttgggtcaagacgcttccattcataaaaactgtccgcagggatgatgcaacgtttgctaacaagcggttttctgaagcaaagtttctcggccaatgtttcagctcgagcattgatcattttatagccgatcttttcatctttagcccaaggagggataagaccccatcttagcttacccagacggttgtttgatccatcattaatgattgtcaggatgttctgtgaaggagctacattataacttggatggtatgcgtcttcagacaaaaattgatctatattgaactgttcgatgatgtcgtcaaactcagaaaataaagtgaacctgccacacatgttcatcatcctttagggttttttgaatattgtacaggcttgatacacgaaaatcaaaaaggaggaatgtgatgcagcggcaaacagttgaggtaaaagaagttgtagtgttgatcagagggatatggacaaagaagaagttcacggatattgaaaaggggcaaacctttaagattgtggagaatggaagagtaaagaaatacatagcaagaacagatccttattgggatgagatgtacgaagcctacataattgatttatttgataaaaataaaataagtggatgtgagaataatggcgatcaatttaaagattagaaagaacaaagcagataagccaaaggtgaaagatttagaggacgggtacttcattaaaatagatgatgctgatgtatacattgttagaacactagacagagagtatgccgctaaagataaacatgaagttattcttatcgatctgagcaccttgcaaatagcgccatacaaggatatgaaggaattaaaaagtaggctgtctaacagaggtagcacagttgaagttatcagacctaaacaagcaaacgttaatatcggttttgagtggagacaataaaaggaggtggagagaatgagagatattaaatttcaggcgttggtagttaaacatacattaagcaatttgggttctaatatgcattgggcaggtatagacagttacgaagaaattattgatgttcatgacatttcttttgataacggaaaaatagattacgttacagataaagacggtgatgaattttcgtttgctgataaaagtttgaaatcggttcgacaatacaccggattgaaggacaataacggcaaggagatttatgaaggggatataattcggattactttcgacaccacatgggctgaagaaccttattacgttggagaagttaaattcttggatagcgaaaactatccagcatttgatttaaggccttggattgattgtgagatgaatgctttgagttggttaaaaagcgaatcagacccgactgtcatcagttatgaagtaatcggtaatatttacgaagatactgagcttttcgaatctaaataaaacagagattttataaggataaaaataaaattaaaaaggggaaatttgatgaagctaattggtattaaaacaagtaactgttttttggtgtctgacaatattgaaggaaagaaatattttcatagtcaattagatgaattgtttttcgatgggaaacgagcaactgaaacgtataaatcagactggtttaagcttgataaggagccaagtgttattgaaaaacaaatgcctgctaaaaaaatcaatcataggtatgaattaaaagaggggttccaggaaactgatttgacgccacaagtaattaaaacttcttacataggtgaagacagtgaatactatgaagtgaagggtctatataatttaaaatttgaagaagtcccgcaacagaatcaaaaaattgagtttgaaatgaatgtaattgaagaaattgacggagaacttaagttgcaaagccataattttaacttgaattataacttactggatagaattcaaactcatccaatgcttcttgaaacaaagccgtgttacttgtcccgagaagaaagctataagattatcagaaaccatataaaagccaatataaaccctaagtttgcaagaatcacgagtgattatgatttctgtttaactgtggtcaaagttttggagctttgcaaacctcaagagtacgtagttgatctaaatacaatgtacaaacgtagaaagcctaaacttgagaaaagatttcaaacaaagcgggaagttgaaatttacaatgttgcacctaaagcctatcagagctacccaattgtagaaccgtttagtggcaaagatgttgaggatttaaagggcaatattaagaaatttctagatgatctaatggataaaattaatgagcctttagtcgaatgtaaatgctgcgaaggaagaggggttatcttaagtgaaaattaaattggacaaagattacatggtaaatgaattgcggctgcctgaatcctcaattttagaagaaatcactgatacgtctaggtggagtattcattatcgtattgtgtttgcatatcaagacaagttttatgagacaacttacagggaaggcgctacagagttacaagaggagagaccatgggaatacgatgaccaggttgagtgttttgaagttgagcttaaggaagttaaggttagaaaatgggtaagaaaagaatctaaataataaatggaggcggaagaatgagagaaatcaagtttcgaggaatgggcatcaacggagaatggtattacggcaatttatcaatcattaagcaaagaatcaagagtatgggtattgatcctggttcttatatctctaataaagctggtgttccatttgcttacagtgtcaggccggaaacagttgggcaatacaccggattaaaagacaaaaacggccgagagatttatgagggggatattttaaaaagaacagtcacggttgtcatgtacggttcaggcaaaccacctaaagatattgatgaatacttagaagttgagtatcgggaagattatgcgggcttctatatcggagaaaggccactgtttgcttatgtggacaatactcgtgatgtcgatactggctgcagatgcagcaaagcagaagtcatcggcaacatttacgaagatcctgagcttatagagtctaaataaaaacgatatttaaccagatagggagatgtttaaatgacttcagaagaagcaagaaattattttgtgcaaaagggacttagttatgaagacattacggagggagatatttgtgctttagttatgctactcaataagcatgttaaacaggcagttaaagcacatacaatgtctgttgatacaatgagaatgagtcagaaaataaaaagcaaatacaaaacaaatggaactttaaaaagttgttatctttacataaacagtcactattttactcaaagagaagcaattagttttaatccagatggttttattggtttcgcagggtgggcagattcaggcaatagacaacctataattagtgcttttactgaatgggttgattatatgagtgaacagttaagacaaatcagttaaaagtaattttttatttaagggggtgataacgatgtgatcgatttatatgatttgagttttaaaaataaaacaaaaataaaaaggagtggttattaattgttgaggattaaaaacaaaatagaggaattgctaaaaaagactaaaggagcagaaaagagagactttggacggtacactctaatctgcacacttcgcaaggttacgaagctattaaagtatatcacagaaaagaagtcttttccagtattggtgacagcattggtttcgttcatgaatccaatcagtatcttagcagcggacaagtatcggaactttgaagagcttaaagcgaatgaatcaccgttcaattttagcgtgttctcaaaagagcaagacactgatgtattaattcttgctccccatggaggtggcatagaagggggaacaagcgagcttgcaaaggaattaagcgaaacatactctacatatctttttgaagctttaaagacaccaggagcctttgatttgcatttaaccagtacgaattttgatgaaccacaagcacttgaaatgttgaaggggcatgagttcacattgtcacttcacggttatgcaagtaatgatcaacatgttctagttggcggcacagaccgggacaaagctgaagcgataacaagtacattaaataatgccggctactctgcagagcttctagatgagggtacgaggctatccggtagcagtccaaataacgtggccaataaaaataaaacaggaaagagcattcaactggaattgagcactggactacgcaaatcaatgttcaacaccttttctctgaaaggacgctctggtacaagaaatgagactttttataacttcattgacactctatcagggtttctcaatgaaaatgtagaagggaagggtttgacaacatgaacatgcaacagcccttatactattttgttgatgctctggattggggaattgatgataaagggtcaaatgcaattgaaacaacagaaggattaaaccgagctttagagtatgcatgctcaaaatcattctataaagtatatgttccaaaaggtatctacctaattgatgcagtgaatacgtcaaagcggttacctgaattcggtggaggtatcaatgttccttcgaatattgagctaatacttcatccagaggctatatttaaagtgcagccaaatgattatcagggttactcctgtttttatatcggccaagcaagtaatgttacgattcgtggcggtcaaattattggggatcgacatgagcatgattattcaaaaattacctcaattaagaagacgcatgaatggggctttggtatccatgttaatggaagtagcaatgtgctaattgaaaatgtacaagtttctgactgtattggagacaacatttggatagcggctgatggaatgatgaacacttcaggaacatatacgccttcaaagaatgtaaccgttcgaaagtgtacgcttttaagaggaagaagaaataatctggctaccaatggttgtgaaggtcttcttgtcgatgactgtgatatagaggaagctggaggagatacaattgggccacaattaggaattgatttagagggctttggagaaaacggaattaaatacgatcacccgtataaattaactgtgcgaaactgcagatttaaaaacaatggacgtggatctgttacagctcacacaagcggcaaggtaattattgaaggaaactacagcgaccatgttatttcctatggatatagcacggatgtcagtatcaaaaataacaagatcatcaatgaaaatgaaattaagacttatggaattgactcggtaggtgtttcaagtactgagtctggaaacagagttcaaattgatggcaatacgattagtggctttgaagtgggcatttgtgtaagaggaaagggtggcacagtatcaaataatacttttgaaaaaataaaagcatgccctattgcaacacatcaagcagaggactttttaattacggacaacaggatagaaaacagtgattgtgttcaagtccaggttagaaactcaaatgatattaaggttgtgaataccaaaggaaaaggaacgagctcgtcttatgctgcaaagataatggactctacccgaatcagtctcgttaataatgagtttgctaatgtatatggtggaatttattgcgaaaggtctcagtcagttcgtttaaagggaaatgacttgttgttaagtgggagtggatacggcatcttttgggataaagactcttctgtctcactgcatcgaaatgaaattcatgagcctaggaatgttgcaattaaaggcacccctgagaaatacagttgccagattagtgagaatcaggtttatttctgtaaatcattaatcgccatccaactgactggtggttcagaacatatattaaaggataatgagatcatgttcaatcgttcagcagaccaaggatatggtgtttatttggagaatacaaacaaggtacgtctcgtaagaaacgatgtgcgcggaattggtggcaagttattatcccacccatattgcacagataaagcaaagaatacaaccttaatttataacacatatgacagtggaacactgaagactgcagaaggagatattgtggtctaaataaaactgtagttttaacaagtttaggagatggatatatggccaatattttaaccaaagaacaagatgaagcaatccggtatttcaagaacaagctgaacatatctgaaaaactgtacatatccctgattaattttaatctgcttagagataaacacgaagactttggtaatagactatatgagctttataagacagacccttatctgtatatcagagcgcttaaagaaggttatgtggttgatcagccaattgaatttaatgaagcaattgtgcggttctatgatggtgaagaacttgctgtgatccataagactactgggaagagatacaatgtgaatgttaaaatgaaaaagcttcctgatgggtttacgctgcaaacaatgaacatgtggtcttggagtgaggttatttgattattcaaactcctttgtaaatggtataattgaattaataaaggagtggtattatgtccatcaattctattggaggctgagtcatgggagttagagtgggaggctaataagataaacattttgagttgctatttaagcggctcttcttttatgaggtattctaaaaaatatcgtcgataaaggagaaactgatgaatttcttaacagcaaaaaacgagtacggtgaaacggtttactttaaaactcttaatagaaggcctcgattgggtgattttgtgaaaccaatcgatacacgacctgtagacattgatggcaatagaattaaagaaagtggcaatagcgcaaataaatatgatgatctagatatcaactctttttatgaagtatacaggatatttaatgttaagcatgtaatcattaaagataaactcggtcataaagttcaattagattcaagtcaataccaattagcaaagaaaatcactaaagaggaatatacgaattttaatgaaaaacttcatttattaaaacatattgataacaaccttaaaaggattagcaacttttccagctaaataaaagcactttgtcgagctgcagatagtagctcaactctttttaaaacttttgagaataaaaataaaatagttattgaccgatccgttttggtgatgtaagattaagttatcccaaagagagaaaggaggaaagagatgaaaaaggaattaaagatactgaaagtatctgtcgaagccttacatacctacaaaaatgatgtcaaaaggaattacgacattgacgaagaccaagcaagaagaaagttaaccaggaatgtgatgttggtaaaggaatttaaaccaagaggaattaaaagaggtcttttttctaaaacatactcatatggaaacttaaagatcacaattcgacatggaacagtaataaggattgaaaatgtaaaaggtgatcctgaaccttgggactttccaaaaaagagatacatagaattaaacaagctacttggtatcaaggattgtaagtttagtagcaagtctcattataggcattttaagaataaaaataaaatataatattaacggaggcgttatattgagcaaactttataatacatttgaatttatcggtaacctatttatttcaaacaataaagagaaattccatgaaattaaggaatatgacagcggatgggttaaggaaagattaagcttcgcagttcaagagtcaaaaacaaacagtgtttttgttgagattgaaggtggttactcaaaaagcaaacaaaataaagtgttttcattcagcaagggtacagaaaatgaaaaaggatcaagactcgaaattccatgggaagatcggttgaaagaagaaacagtaaacatggttgctgatttttctaagatcctaattaacttaaacgatgagtcaacaaaaaccaaattaaatgaattgaagtttaaaattagagggttggaaatgaaagactctcttactgaagaagaaaataaaactttatctactctcaagggagaatataaacaattaaacataaacggtgcagaattcattcatgaatacgatgctattcagtacttatcccaaaatctcgaaaagcataaagacaataaatttaaaattacaggtaatattgaatacaattcatggaatggacggaattttagaaagttcaaaatcaaaaccattgaaattgtaagtagtgatacaccatctcaactaagagccacaatggatgtatttttcacaagtgaatctttagatgaatcgtcatttgaagaagaaaaaaggtactttgttgatgcatatgtgcttagctatgataatcaggcaaaaaaagatcgattttttcctcagcaattagtcattaatgcacaaaaattggactttgaaaatgatttacatatgaaacgattaaatctcttgaaaaacttctttaaagttgaaaatgatgaagtatatcaccttcaatgggttgtgaatattttcaggggtgctgatgagattgagtttaccgaagaggaactcacggaaagtcaaaaggaaatgattgctttaggtttaaacacactagatgactttaaacctaaaggagggctattgggcgaaaatcgtgaagaaaatagacttttaaaacctattttaaaaaagattaatgattctaatgattttacagaaggtgctgcaacatctacatatgaaattgaagatcttacatatattccacaacagattcaaaattctacaccacccgtagaaaaagaagaacctaaagtgactgaagaagaaaaagataatgcatttgatgatttatttgcttgatttgaaaagacctaactgacatttatttaaaaacaataaggagatgtttatccatatggcaagaaaatttggtaaaaagaataaaattaaagttaatcctctcgattataacactggaattattggtgaatcggggatcggtaaaacaactttagctaaagaagtttgcgaagaattagtcggagcagatgggtatataatcttgaatattggtaaagaggatggcatcgatgccatcccaaatgcctcctatgaagatgttcctgattggacaacctttaatgaaattactaaagatattattaaaaacagaacaacagattatgcagatttaaaggttttagtatatgacacatttgatgagttaattaaaattacagaaccagaagttattcgactacataataaagctaatcctgaaaaaagagtgaatacaattaaagcagcgtttggtggtttccaggcaggagaagacaaagttattgagttaattcttgagaagatgtgggaacttaaaaaggtcggtattagcatgtttattttaggtcatacgaagaaaagaacaatgacagacgtagttacgggtttggaatacgacatgctgacaaccaatatgacacataaatacttcaatgcgattaaaaccaagctgcacgttttaggagtagcatctattaatcggtcgattgaaaagaaaacagtaaaacaaaaaattgggcctgacaaaacagtgggaacagttgttgatgaatcaagaatcatcacttttagagatgacaactttaatattgattcaaagtcaagattctccgatatcacaccatcaattccattagatccgaatgaatttattaaagcaattgaacaagctatccatgtggcttttgataaacaaaaaaataatacaaataacattgaagaagaaagaaaagaacaagagcaaattaaagaaattcaaattcacaacgaagttaacaactcatcttttattgataaagaagagaatgagaggttggccgaagagattaagacactattccctaatgcaactgccgaagctaagggtgaaatgaagaaaattatggatcaatttaatatgaaagattttaaaggtgtagacattgtaccaactacagcattcgagaagatagtcgaagcattatctaactgaaggaaaagaggggggagtctcccccttatcaataggagagggtattcttggccagaagatgtgtatgtcaaatatgtaaagctaatggaactgttgatacttttttcagggtttctgatgataaggggaaaaataaatactactgtactaaggatgaatatgaaacctatatcaatgataaggtgaaacgaaaaaacctcttaaactacatagcgaaagatgtcttgaattatagagagggtcaagtcattcctccaatttttctaaaaaagatagctgaactaaaaagattttatgattatgaagtgatacaaatttgctttgagaagaaccaacaaacaattcaatattggttaactaataaagagttttacaacgagtatgggatgattagctatatttttaagattgttgaaagtaacatcaatgatgtttataaggaatggctgcatgaacaaaatcagagaatgattgaaaaaaatcataatcttgatattgcaattgtaaatcaaactaatatcgttgattccacatctttaaaacaaaacaattcaccaaaaaatataacagagtttctggatggggaggacgagtattgaacaacttagattcttatccaaaggaattagttgaaaacaggggacaaattgaaggaagctttatattttgtttatggaaaaaccctgatttgtatgaggattataaagaccacgtgagggcggatagagattttctaacagaagacgggaaattttattactctctaggtttagaactgagcaacatgaattataagagctttgatgatgcgagtgttttcagctacatagaaggtaaagaaacattaaaaaatggttttattcggcgaggtggaatgaaaaccattgatgaactcaagcacgtactaaacgatgaaaatgttgagacatactatgatgaactaattaaatttaacatgatactaaagcttcatgataagggattcaatgtttcgaacgagcttgataaattcaagaagatgacgagtcaacaattgtacagttactttgaatttcaattagataatgtttttctaggtcgcggttcaggagtgaaaattgaggatcttgatttgaatgaagagtttgtcgaatcaattgaaaacggggaagaaatgggattaagctattcagctgcatgtccattattgaattatcacacgcttggacttcataaatctaatgttcaaatttttgctggatttagtgggacagggaaaacaagtttttgtgtttcttcttatatcatgtcaattttagatcagggtgaaaaggtaacaattatcgccaatgaaatgaataaaagggcttggcaacatatttttatggcaacaattttaagtcataaacttggttattatggtttgccaagaaagaaacaaaaaatgggcaacctaaagcatgagcaaaaggaaatgttacaaaaggcaattgaatattatgagaagcattacaaggggcgtatcaaatttgccaagatatatgattacagcattaatgatgtaaagagaataatgagaagaatggcaaaacaaggcttcggttatatgctttacgatacatttaaagctgaagatgcggcttcaaccaatgtaacaggtgagctaattgaagcctcaaaacagttattgcaagttgcggaaaaagaggatatttgcatcatcattacaatgcagttggccatttatatggagaatacgagatatctaacagcgtcttgtttatcaaatgccaaagcagttaaggagattgtttcagagttagttctaacaagacctttatgggaggatgaattcccaggaggaaaattcgatgttaaaccctatagattcaaaaaagactcgtcgggaaaatttacaaacattaaagaagaaattcagttagacccaaataagaagtatagattattctttttgaataagacacggaatgacgaaggcgatacagtgttgttataccaatttgacggtgcatggaataaatggaatgagctcggttattgtactcctaaacatcagagaactacagagcggacatgattaccaagggacggtgaaatcatggacgtatatgatcttaagaatcacattattgaaaagccagagtacatagtacttattttagaacagacggggttttacaatgttgatgaacgcgggaatgagtacagatgtgcgagaaaaaaaggaagaaatccgacttcagtaaaagtaaataaaaccactttaggtgcaacctgtttttcaaccaacttaaaaggtgacttgataacacttgttcaaaataaattgggtttatcttttcccaaaacaatcaaaaggatatctgaaatagttgattataaaagtgaagaagaatataaaccacctgagttaccattcggaggtttttataagaatataagaagactaagtaatccaatggatttggatctagaaacgtattccgatgacattttagatcaatttgtatctgttccaaataagttgttttatgaggatggaatattacctttaactcaatctttgttccaggttggttacgatagtgtttccggaagaataacggtgccatggaaatctcttagtggtgaattgtgtggtgtaatggggcgtcttaataagaaggaagttaatgatgaggaaacaaaatggctgcctattatttcatttcccaagtccaaaacgctatacgggtttgttgaaaattacagttcaattagagaaaagagcattgttatgatcggggaatccgaaaaacattcaatggccttagcaagtaagggattgaatgttggagtttctttaggaggcagctttttaagtgaaattcaagcaaatcacataaaatcaatgtttccgaaaaagtcattagtcatgatggatgaaggattaggtgaagaacatagcgtagaaattgccaacagcctaaagtttgaaaatttctttgaaaatgaagttgggtacatatttgatcgtgaaaacaagtatctgcctaagggatcaaaaatggcaccagcagaccttgataaaagcactctacaccgtctaatcagagactgtacagtttggatatgaaaaggagatgattgattgaaagaaacattaaatgaattgagacaacaagggaaaaacatttattccttttcaaagcttggaacctttaataactgtgaatatgaatactacaatacatacgttttgaaaaagaaaggcatagataatatttacacccttatgggttctgaattacataacggaattgaacagatttataaaaatgaattagacattggtgaatttaaaaagggatttgaaaatagattaattgaattagagctgaatggagtcaactttccgagtgactcaatcggagacagctggaaagcagacattggtcatttcctaaacaattttaataaaattgacagcaaaatggttttagagaagctgcttgtatttgaaatatcagatgggatttatcttcaaggatatgtagatgcaatccttcccagtgaaaaaggaaaaccatacgttagtatttatgactggaagacatcaagtaagtttgccggcaagaaattaaatgaagcaggaagacagctattgatgtacaagcttgcattggagcaaacaactgacttaaaagtagataaaatactatggttcatggtgaaatacgtttatgtatgtacccaaggaaaaaccaaagtgaaaaagaaaatgtgtaacagaggtaagtgggtaaaggaaatacgaatgaaactagaaaaagagatgcgcactttggagtatgatgatttcgaaattgacctattgttagataacgcagtaaaagaaaatagcattgactgcttacctgccgagattagaaataagtattggcttgaagattgtttagttgaatacgaagttactgaagagaaaattaatgaactgaaagattatattactggtactgttaaaaagattgaaaataaagaccgtgaagatgaaacccaatgggaaccagtgaaaatagataaatacaattccttttattgcagtgtcttatgtggtcaccgaaaaacatgcaagttttataaggattttttaaataaatcatcaaataaatttaagaaaaaggataagaccgatttgtttgataacctattttcttagggggtaatgatgaggaagatattctatgactttgaagtttttaaacataactggatggttgtgctgatcgattatgatactaaaaagggtaaggttattgtagatgatgttgatgaactgaaacgattctataagatgtttaaagatgatatttggattggttacaactctagaatgtacgaccaatacattttaaagggaatcctgttaggaatgaatccttattatattagttcaagaattattaatgataatgtaaagggatttaatgttgttagagaaggttataagatcccactgaataactttgacataacaactggtttccacagcttaaagcagctagaaggctttatgggttcaaggattaaggagtcatcagtaccatttgatatcgcaagagcattaacagaaaaagaaattaaggaagttgttgagtactgtattcacgatgtgaaacaaacaattgaagtgtttgataataaaaaagaggaattcgaaagtcaattggctttaattgaagcctttgatttagaaatgtctatgtttacaaagacaaaagcccaattatctgcatttatcttgggggctgaaaagcaaggaaacaggggagatgagtttgaacttagatttcctaatacattaaaaattgaaaaatacaaacacattgttgattggtatagaaatcctgaaaatctagattataaaaaaaacttaaaggttgatgttgcaggtgtacctcatatttttgcctggggaggtttacatggggcattaccaaagtataaagatgaagggataattttatgttgtgatgttgcatctctatatccttcaatcatgattgaatatgattacatcagtcgtaacgtgaaaaaccctttgaaatatactgaaatcagagatacacggttagaattaaaacgcaaaaaagatcctaagcaggctccctacaagatcgtcctaaactcaacgtatggagcaatgaaagatcagtataatccactttatgacccgttaatggccaataacgtatgtttagccgggcagctgttgttattagatttgatcgagaaaattgaaccgtattgtaaactgattcagtcaaatactgatgggttgtttatgaaagttgagaaagaatctgatattgatttaattaaggaagtggcgaaggagtgggaaaccagaacacgattagatttagagtgggatgtttatgagaagatttatcagaaggatgtaaacaactatataatcattgataaagaccagaagtataaatctaaaggtgcttatgttaaaaaactaaacaacctggattatgacttaccaattgttaataaagctatgattgagtattttacaaaagatattccagttgaaaaaaccatcaatgaatgtgatcagttaagagaatttcaaaagatatcaaaggtttcaaacaaatatatgtacgctctctatggagaagaaaggctacctgaaaaagttttaagagtttttgcttctaatgatgaagatgctaaaggtgttttcaaggttaaaacagaagaacgaattgaaaaaatcggaaatactccaccgcgctgctttataaataatgataacgttattgatttaaaagttcctgattatcttgataaggaatattacatagagatagccaaaaaacgaataaatgattatttaggaatatcgaatagaaagaaaacaaagaaggagaagtgatatgcatcgccattaagagtaaaaataaaattaaaacacacattttcaagtctgtttatggtatgatgattttgattcccttaaccactttttcttacataagttatgagcaacatttacataaaacagagggaaatgaagactcaataaaagaatcattttataagaagcctagacagattaggataccatcaagtgagaatattgtcttacggctatttaaaaaagctcaaactaacaaagaacagcaattaaaaaggcatacagagaagattatctcagcaaaactcattaaacctaagcaaagtaaaaaaaggcacaggaagggaggtgagacggtaaagcataaactttttaagagtaaaaataaaattagtattaaagaaaaagaaaacaagccaccggccgcaaagaaaaccatccaggttaagctgagtgcttatattgcccactgccaagaaggatgcacaggaacaactagaacaggtgttgatgtcactcaatcaatctattacaaagggtatcgtgttattgcaaccgaccctagtgttattcccttgaattcaatagttgaagtaagcattggtgggaaaaagttcaaagcaattgcaattgatactggaggagcaattgttggaaataaagtggacttgcttgtagcaaccgagcgtgacgcaattaattttggcaagcaaaaggggacaatctcaattattagttaggaggcgattaattgccgaagttttggtcttatccagaagggttaaaagtcatcataaatgagaatgcaaagaacgcttgtcctcatcatgttggacgggaagggaaaattattgagctgctacactctgccacatatgattacgcagtcagtgatgaaacaggtgatattacattcttcaaggagcatgaattaaatccagctaaaggaggttgattgtatgtttaaaaagggagagaaggtgattgctggtttcacaggagagattggtgttgttgcacaagttgataaaggacatgagcaattagaagttgagtatccagacggctcatatagagtgattggcttcagcaatgtaagaagggtggaagataaatgacgatgattattttagaaggcactgactgctgctacaaatcaacagtagcagataagctaagcaaagaactcggatatccggtaataaaaggatccagctttgaattagctaagagcggtaatgagaagctgtttgaacactttagcaagctggctgatgaggacaatgtaattattgaccgatacatatattcaaatttagtttatgcgaagaagttcaaggattactcaatcttaacggaagagcaacaaagggtcatcgaggagaagattagggataaagccaaggtgatctacttacatgctgatccgaaagttattaagcagcgtttacttgaacgtggtgacgaatacataaatgatcgtgatattgagccggtattaggattatacagagaagtaatgagcgatgttgggttacatacatattcatgggatacagaacagtggtctagcgaagaaattgctaaaggcataatctttttaacggatggggtgatttatgaagaaagtaattgcaattgacatggatcaagttttagccgatttactaagtgattgggtagcctacattaacacctatgatgatccttttctaaaagaggaagatatactgtgctgggatattagcaaatattcaaatacccaaaacaatgtttacaggcatttggattacgaattattcagaaatctggatgttatagaaggaagtcagagagcagttaaggagctggcgaagaaatatgaagtatatgttgttactacagcaacaaaccatccagaatcccttaaagcaaagttagaatggctcacagagcattttccatatattccacatagtaatgttgtgctttgtggcaataaaaacataattaaagcagacatcatgattgatgacggagtgcataacttagaaacatttgatggaatgaagatactatttgatgcaccgcataacaggaatgacaatagatttattcgtgttatgaattgggaggagattgaacggaaattactttaaaatatcattatatttagagtgaaaataaagttaaaaggagtgaattaacactccttagtaaactaacgtgcttctactgtaattttataaatcacataattgtcgttaatgtcatacgcgtaaaccaatgctgtgcccaaagttgaatgagaggatacgacaccactggaactaatgcttataaggttgcttccagatacaatttcccatcgggtgtagccttttaatagagatacgttagaattcctcagcatgtgaaaatcaactgtaccaagcggatcacctagctgcttaacttgatcaattgatttgacaggggttaaagcagaagcctgtgatgtgaatgcagggagtgctagtgctgtaagcaatagagcagaaacaatcaatcctttgtaaaactttttcataagaattacctcctaggttttgattgtgattacatctccagtctagcatgttaaatatttgaaatgtgtgaagtgtttgtgaaactgtttaaaatatctcttttaaagagaaaggggagactgtaatgggttatagacattatatgtataaaatcagcaaggaacttgtaaacgaaataaaatcaatgaattacaatgaattgtccaaaaagttcggtgcaataggagaagaaggttatttctatataggtaacctgcctaaagaggaaatttgggagtttgggaagttgtattgggatgatacagccgaccgcatttattcaaagggacaccctctctttgaaagagaagaagttatgaatgaattatcggattatgttccatatattgttggtaaagaagggcttgaagaagctattgaaatttataaaaacaaagtcattgcaatgtacgagaacttgcttattgatgataaaaatggaactgcttcagtaaaacaagagcagcatattaagaacaacttatctgagtggactagaggatgggcgttaaatacggatattaatgattcatggctaacatcttcttggaaatatgaatacagtatttttgagctggtcagattattaaaaaccatagattttgagaaagagacaatattattttacggttggtgatctaaataaaagatcaattttatcgaaatgagggtgtgaaatggaagttagatggttagttatttttaatgattgtaaaaccggcagttctttgagtgagcttacatatagtaaggatggggaaggaaaccacctaagattagagtcaatggtgcctcgtacaggtgactatattgtaggaggagatctgtcatcagatataaatgataagaggtgctttattgtgaaaaatgtcttctggaatctagataggagagatatagaggtttatctagatgaggttgacaggactgtttttcctttatataaatcgctataaaatttgtcttttaaagagtaaaaataaaatataagaggtggagtctgtagtgaactacccagaaagcttaaaagaggaagccgaaaaaattaaagatgaagtaagaagcggcaaattagacgaggggaaaataaaagccattgctaagtctgcagttgagtttttaagatctcaagaaaagagtcatgctcattgtgcagaagttgctggagcgattgctgcaaacctagatgagttcttcaagtcttatctaaaagaagattaatacaacaagataacaagaaaggataaagggatgtttattgaaaaggtactatgttagatgtaaagatcacaaaggcgaaaacgcgtctttggtaattgaagcaatgtctacagaagaggctaaacggaaggcattagacatacataaggtaaagactgtttataacgtgagcattggggaaggtagggggacaaattgccttcagagaaaacattcgccgtacataaagaatgacaacgggaaagctataatcatattctcgtagaggaggtatcggataattagggatactgccagggatatcattaataatgacgttgatgagattgaggaaatattagataagctttgggtttatttagagaacaatttaaggccagaggataaccgtatatggaagaggtgtgattcggatattttggcagcaacagtaaagctaagaaatttaaaagaaactttttaagaataaaaataaaatagttgttgattgtttgagagaatgcgagtatattagaaatataagaatcgaggtgatgcattggagtgtgttaaatgcaaggatcacattggcgaaatcgtttattacataagaatagctgacaacaaagaatataaggaattcgcggtacataaagaatgcggagaagcaatcaagaaagaatgcattgaaaattgtaaagacatgaaattagaaaagacattggattacttgcagttactttaagagtaaaaataaaatattccttttatcgagaatggagagatgctaaatggataaattgaaagtttgtttacataaaaaaggtgctcatacgttagaaagaactgttaatggaggctggatattagattcaaaaccaattactcaggatcaagcaattaatgaactagttgaagcggttagtgatttaggatattggtgccaagtagcaaaggatgttttagataatgaagactttaatgcagttcaagaggcgtatgaataccatgagtaataatctagtccattataagaagggagaatgaaatgtcatatttggtgctgggactaatcttgttcggttcaatattcataggtaatggacttacaagtttagttgagaataaaaactttaaagaagccttgccattttatctcactgttttcttaatgggagcttgctcgctccttatcggatttattcttacagtgatatgaacaagatgaagggaaatagtgaaaggaaatataaatgatttcctgggaaagcgcagtatgcgacaaattggaacaaatgatgtctttaggtgataaacaaaaaaggagcatagagccatggaaacattagatgcaccaatttatgagattaagcaagaaagcaattggtataaaactgagaagaaacgaagagaagatattaacaaattctttgatgaattcgaagcaacatacggaattaagaatggtttttcgttctatcattccgagtatttcggagtacgcgcaggaacagaagcatatgacttctttaaagatgaagtggtgaaaaaccccacaaaagctggcttctatgcatttaaaaaacgttctaagtatttcacagacataaggtctatgctagagaaaatagaagaggcaaatcctttcaaaggccatgatgtgttcgggagaaataatataactgcaagccagtgggtaggtgatagatggttttttggcgtaagagatgagaaacgtgtagaaggtgaagaagctgtagctattgacttcaaagattatcttaaaattatcttggagaaattaggttaaaattcaatttttataaagaaaggagaaaaacatgagagacattacatccgaattcacattgagaggagtaaacagaaaaactctgaaactcctggcaactaagagtattgattatccagatacatgggtaaaggttcaaattggagatcaaatagcagaagttgaggcaaagcaactgttggtggcaataacggcatttaatgaaatgtgagaaggaagaaactaacatggagaagtgtagagcagtatttaaaggcaagaaaatagaaaagatttaccttttcagggcatatccatcgtgttttcatggcgtccatgcgaaacgaaagccaccagctattgaccacgagtatttagatatatctactgaaactttttatgaggatgaaattaattttgaagttaactgtggtgacactctttacataaatgaacttgatgaaaatgttcatatagaaaaaaaggtcaaaatgcttgatgggggatggatttacttcactgattatgtcattagcacagtcgagaataaggagagtaaaattcaagctgaaaaacaattaagggagtatttagacgaaagtaaagtaaaagaaaagcatgataatcagctaggaaataaaaggatatcattttggcaacatttgaaacatgcttttaagaaagagatgcaacagtaggaggtgaataagtgggacgacataaagcaacatttgaagggaaggtaattaagaaaagttggacattaggcttgtgtgatgcccttgtcccaatcgagcagcaatgtgagtatcagacattttttgaagggaacatcgacttagacccaattgaagtcggagggaaagtgtatatcccagggtttaacgaatacgtagtcgtaacagacaggcaacgcaacacaaaaaatgaatggacatatcagactgacaaggtcattaaaacaattgaggataaagagagccttgaaaaagcaattcaaaaacaagaaaaaatagagaaatggaatcagcaagttaaacaagactatgaacgctttaaagagcaagaaaagaaacgtaaaacttcctggtggaagaggctaatcactaaaaaagactaaaggagagatatttattgaataaggatacaaaagatatttggaacggtttctttatcggatcaggttctctgattgtagtggggttactcatttttgttgaagcagtgactatgtcactagttgtctattatggattgaatcatgtgttaaacccattgcttattgatacatacaacattcaaaatacccatatcactttacctcatgcatttgtgattggtgttttactcaacgtatttgtcaaaggtgtaaaacggtcagatcaggaaaaagatgagaacattttcaagaaagccggtaagtctttacttcattcagcttttgcattgattgttctgtatgtcagtacattgtttatttaacgaaggaggaatctgaatatgattaaatcgcagcaagttaaagtttttagagagacgttacattgtgatgaatgcgaagaagctccagagcttgtgttttcaaatatgatgctcacatcaaacccaccgaaatatccgtttcaatgcccattgtgcatgaaaaaagtttatatgaaaacaacctatccaaaggttagataccaatcagttgattgaagtctaaatgaaagttttattttattgaaaggatgaagaagaatgaaaatgagaaatgtaaaactgtacaaaacgactgaaaacgtttttcttccaaatgaaaaaacattggtagggacttttgatgattgtgaaatgtatgaaggagaaaggagtgtattcttagagattgcaaataaagatgatcttaaaccaagtgactctagtattcatatagaagatcctacgattttagaaatcacaacttgtcaaggcaaaacaaagactattaggacaaggaaaaggttaactgacatttcttctgatttaattaaaattgaattcacagttctgtaggtcgtaataaaaggatgattttagagagaaaaggaggaatagctatggcttatgatgagatcaatgggaaattaattaatcctaaagttagcgatgtaattaaagcgctacaagaccaacttgattttaacggagatacaccaattcaattcagaattgatggtgaagaaacaagcaatgaaattcaattagatccatataaaaatgttcttgtgtttcatttagatgaagtttaaggaggaaagctacaatagacacatttgttttatcggttgtcaggatagacattataaaggcggtttatatatggttattggagaagcagttcacactgaaacagaagaaaagttggttacatatgaaggccaagacggtgttctttggaaaagtgattattgatgggaaagagatcaagagattcacaaaagtaaaataaaaggagaattggctatggggattaaagcagcagtttttgaaataaaagcaacttgttacgctcatgagggatttaataacgaaagtgaatctgttcaaggggctgcgttagaacagctaggaaaggatatcgtagataatttactcgaaaacggtgttgatgatgtaaaaatcaaaggcgattacgttgaggaattgggagttgagaagcccgttatgaagtacttcgaagtgagcgatccctattatgcgttaattaaagcttactcaaaagaaaaggcaatgaagttatatacaaaagaagttgctgatgatgacggggaattaagtgatgagatgactgaagttggacaagtttatgcggcaatacgacaaggaagggttccgggagaaggtgaagagcttatgccatttaagcaggttcttgaagagatttctaatgatgaagaaatggtattactaatcgagggcagtttactttaacggataaaaatacaaggaggtgaattcatctgggaataagtcaaagacagggcaaatatatcatggaatcgattaatgaaacaaattcaattgcagaaataattggtcatgataaagctatcagtgaagtgttgcttctattaagggaaagagtgttgtttcttcaaagtcgatatgattttgaagaagtggaaataagattaaatgagctcatgaagctgtatgaaagtatcaataaacttcaaagaccacgaaaggatgatgaaaatgaataaaaaatacggactttattgcatgggaacacttgttaacacttatgatgacgctattgaggctcataatgatgctgtgtatgctcaagaagaaagtggagtgccgcatgaagtaagagaaatcagaaaaggagagtagataggatggaatacactaagtatggaaatcttgtagaaggctatataacattcaatctttattttgagacatttgaatacaaagaagatagcttattagaacaagtaaaattcaccacagttaaagagttattcaacatgatgcagccagactatgttgaagaactaaagcaagaaaacggtgcagatcaggttgacgttcatgatatcacgtttagcgctaaagaagatgacactgaggctttcatcacaatgtatgacaactcaggaaactatcgaatctcaacaaatcttgatgtaagtggcttggatagcgagtacaagcaaacattaaaaagcattaaaggtattatagataagaaactttgagagtaaagtaaaggatgatgaaaatgaatattagagagtttattgctgagcagagaaaagacgaaaagttcttgggtttgagatcaaaattaagggaactaattgaacacagaagacttgaacttgttgaaatgcttggatataaaatcgatagtttgaatcaagagcaacttatagaattcaaagaaaaattcagtgaattaactgcatttaaagaaaaggtaggtaatgatcctttcagcattagtctggatgaacttggcgaacttctatgtttccaaaaaaaataaggaaggtagatacaaaactctggagtatgttttgagtaaaacgattgatccatacattgataaaccaaaacaggctacagttatttctagataaaatcacagtttcaaaggaaggggaagcaaaatgagtgcagcaagaaagtggagagatttgagaagcaaattaattggatataaggtctacggtaagttcagcgatgttgttattgaccatattctaaatgatatggataagttagacgtaagacatgacaaagataaaaacaaaaaataaagaaaagggagttgtggaatgggagctgctaaacagttatacgttaagcgcagtcactttgtaaccttggatgaagcaaaagaaaatacgcaagtacatatgaagaatggtggttcatacactgctttaaaaggagagctgattgcgactaatcttgaaggggatcaaatggttatcacacaagagcagaaggataactacattccagtaccaatgacagagttatcagattatgaagctcaaatggccaaaggctatgctgaaatgggagacattaatttagaaatgtctgaagcttttcatcatgctgaaaatgaagcagaaacaaccaccaacagtttggttaacggagaatataaagaatattgattattacatatgaaagcaagacaggcaatgtgaaaaggtttgctcaagctttacaaagggagttaaacttcgatgtcattgaaattacagatgacttaatcattgaagaagaatttatacatattacatatacgataggctttggggaagtacctgaaaggactttaaactttattattaagaataaaaataaaataaaaggagttgttgtgagtggtaacaaggtttggggtgataactatggtttagctggggacaagctctcagcaatgttccacgtaccattgttattaaagtttgaactaagcggaacaaaacaagatttgcagaagattaatcgggaggtacaacttattgacaaacacaataccaaagtggattaagctcaataatgagatcatgattcagaaagacggtaagtttcaatttgagaaggataaggaggcagtacacagctactttgttgattacattaatcagaacacagtctttttccatgacttaaaagagaaactggattatctgactaaaaatgattattacgaagaagaattcttaagcgaatacacatttgagcagattaaatcgatttttaagattgcttacagttacaaattcagattcccttctttcatgagtgcctttaagttctacaatgactatgcattgaagacaaacgacaaaacaaagatattggagagatatgaggatcgtgtctcaattgtagctttatattgtgcagatggtgattatgaaaaggctattgaggaagtacacgccatgatgaaacaagagtatcagccggcaacgcctactttccttaatgcaggacgtaagcgaagaggtgaaatggtaagttgcttcctacttgaagtgggagacagtttgaatgacatctctcgtgcaattgacatttcaatgcagctgtctaaattaggcggtggtgtagcattaaacctaagcaaattacgagccaagggtgaagcgattaaagacgtagagaatgcaactaaaggtgtcgtaggtgttatgaagctattggataatgcttttagatatgcagatcagatgggacaaagacaagggtctggagcagcttatctaagcgtattccacccagacatcacagacgtccttgataccaaaaaaatctcagcagatgaagatgtccgagttaaaacactgtctattggtgtagttctccctgataaatttattgaattggcaagagaagataaggatttttacatgttctatcctcactcagtctacaaagaatatgggaagtatcttgatgagatggaaatcaataaaatgtatgatgagcttgttgaaaaccctaaagttagaaaagcaaagggaaatgctcgaaaactgttagagcaattggccattctaagaagcgaatcaggatatccgtatatcatgtttgctgacaatgtaaataaagtgcatccaaatgaacatatttcaaaagtgaagttttctaatttgtgcgttactggagaaacacttcttttaactgagaatggatatgaaaaagcagctgatctttacaaaaagcagaatgagcttaaagtggtcattgataatagaacaaaagattttgcagttggcagcaaaggtacttcaatagtagatgcaattccaatgcaattgactaaaaaagatgcggaaatatttaaagtcaaaacgaagcaaggatatgaaataaggacaactgagtggcacaaattctatgtgaaaagggacggtgaaattcaaaagctccaattgaatcagctaaaaacgggcgataaattattagttcaatcaggtgagggagcatacggcgacattcatgagccagatcttgcttacatcatgggcattatagctggggatggaaccattactgaaaaaactgccaagatttatttatacgataacaaaaaagttcttgagcagaaagttactgatgcagttcaccgtattattcaaaaacacaagctcgatcgtgcttataaacacaatacatcactggctccaacatttaatatggctaatccagaaaaacaagatttactctacatgaatagtacagtcttatttgacatcttgaagaagttcggtatggacaaagaaactaaaacaagagtcccagaattcatttttcaagctaataaggaaacgcaagcagcttatttatcaggtttattccagactgatgggtgtgtaaatgcaaatcataaagccaaagcattaacaattgagttaacatccattcactatgagagccttcaggacgttcagaagctattactaaacatgggtgtttatacaacgatctattctaacaataagcgttcacaagaactccttcctgacgggaaaggtggttctaagctgtacaatgtaaagccaactcacaaaatcagtattcaagatagaaactcaagagagttgtttatgagcattgttgaaatgaaagaatacgatatttataaattcaatttgctaactgagacattgcaaccttcttcaagaaagccaaagcatgattttacggctgaaattattagtattgaagaagatggtgttgaggatgtttatgatacaacacaagaagactatcactctctgattttcaatgggattgttactggcaactgttcagaggtgctccaagcatcacaagtctcagtttatacagattacgatcaggaagacgaaattggtttagatatctcatgtaatcttggatccatgaacattgtaaacgtaatgagcaatcaatcaattgcttccacggttagaatagcaattgactcactaacgactgttacaaggaaaacaaacattgtaaatgccccagctgttgcgagagcaaatacactaatgcgatcaattggtcttgggcagatgaatctacatggttttttagctcaaaataaaattgcttatgaaagtgaagaagctaaggactttgcaaatacatactttatgatggttaacttctactccctgcaacgttcaatggaaattgcaaaagaaacaggggagacgtactacaagtttcacggatcaacttacaaatcaggcgagtattttgataagtacgtgacaattgattatagccctaaatatgaaaaggttaaaagcctgtttggagatcaacatattcctaacattgaagattggatgaagcttaaagaggatgttatgaaatatgggttgtatcattcgtataggcaagctgttgcacctactggaagcatctcatatgttcaatcatctacagccggtgtaatgccgattatggagagaatcgaggaacgtacatacggaaacagtaagacatattatccaatgccaggtttatcggctcagaattggttcttttataaggaagcatacgacatggatatgtttaaggtagttgatcttattgccactattcagcagcacgtcgatcaagggatttcatttacgctgttcttgaaagatacgatgacaacgcgcgatctgaaccggattgatttatacgcgcatcatcgtggcattaaaacgttgtattatgcgcggacgaaagataccggccaggattcgtgcttgagttgcgtagtttaaacgaaggggaggcggagtcgtgaagttagaaatcggtcaagagtgggtcagtgaaaagcacccacatgaaaactttaggatctacggaggagtagtggatacttgtgcagactcatttaaggacgaaagcataacattcgatgagcagccggaatgggctaaaattttcttctgggagcgggcggattatgcgagtttcgataaatacgtcgaatcaaagctaggaaggaatcgagatagtacgtatcctttcgctagatgtggagagacgaagaagtccggattagtagcaaaaatcaaaaaattcaatatggtcgttaaagagaaggaggatgaataattgacgcaatatacagcagcaaactggtcaaagcatgaagatgatttcacccaaatgttttacaaccaaaacgtaaagcagttttggcttccggaagagatcgcattaaacggcgatcttcttacttggaagtatttgggtaaaaatgagcaggatacgtacatgaaggtgctcgccggcctgacactgcttgatacagagcaggggaacacgggcatgccgattgtggccgagcacgtcgagggccatcagcgaaaagcggttcttaatttcatggcgatgatggaaaacgcggtgcacgcaaaatcttacagcaacatctttcttacattagctccaacagagcagatcaacgaagtgtttgaatgggttaaaaacaataaatttcttcaaaagaaagcaagaacaattgtttcaatttatgaagcagttcagaaaaacgatgatatttccttattcaaagcaatggtagcgtccgtgtttttggagagtttcttgttttactcagggttttattatccactttacttttatggacaagggaagctcatgcagagcggggaaattgtaaatttaattatccgtgacgaggcgatacacggcgtttatgtcggattgttagctcaagagatatataagaaacaaactcttcagatgcaaaaagaattgtttgaatgggctttaagcttgttgcaggagctttatgaaaatgaattggagtatacagaagatgtttatgatcaggttggtttagctccagatgtaaagaaattcatcagatacaacgcaaataaagcattaaacaatctgggctttgatcattggtttgaagaagaggatgttaatccaatcgttattaatggattgagcacaaagactaaatcacatgacttcttttcaatgaaaggcgttggctataaaaaagcaacggttgaaccattaaaggattctgatttcattttcgatagcaaaggagttatttcatgagactgattaaattagaacaaccgaattgcaatccttgcaaaatggtatccaattatttaaacgaagcaggagtcgaatatgagacatttgatgtaacacagaagccagaagtggcagcgcaatttgaggtaatgagtgtaccggtgactatactgctgaatgagcaagaagaagtaaagcgtagtgttggatttaagcctgaagaacttgatgaactactaaagggattacaataaaagataatttccttaggggagggctaaccatattcggttggaatattaacgagatttcatggtggaagtacatactgcttttaatttttttaattactgtaatacctttgttgataatggattggataaccttctgtaagattaagcatattgactggattattcaacgatattcatgttgggcggcctatttaatttttggatagatttttcacataataaaacaaaaggagaatgttaaatggggaaaatggatgaagtaattgttgtagcacctagagataaagtatttgataatgaagaactagtctttcaaggaattgaatctgatctaggcaaggttgatcaaataatcgaaaatctcgctgaaagcatgatcactatgaataggggagatgctgagagggatcaaagctgtaagcaaccaattccctatgccattttacaaaaaggagaccgagtatttgcatacgagcggttaagaaaaagcggggaaaagaggcttcatgatcaattatcaattggtgttggcgggcacatgaatttaactgaagcaacaaatttttgggaagctattgatgagaacttaaggagagagctttcagaagaggtgtttatctcaacttccaatttaaatttagaagttgtggggttgataaacgatgacttaaatgaagtggggaaagttcatttaggcataatgattattgttaaactgcctgaaaatgcagaggtatctgtaagagaaacagatcaattaaaaggcttttggttaaataaacaagattttgataatccattagtatttaatcgtttagaatcttggtctaaatacgtggcagatattatttattagtttaaacccctggctttgatcatgatgtttgtcagtggagggtctcagccagggtacaacttaaaatactcaaaaaactcaacaattatgcctacaaaggagatgctggatgaaaaaaagattacgcaaaaaggcgtggatgacagggaatataaaacagggcgaattcatgtttaatgtaattgataaggtaaatgcagatggacatgtatattatccaaaaggacactatcatgtagacaggaaagggaatatgtacaagttcaaaatttagaaacaagcgaaattgtgatgactaaagttgataaagatcttagggataccaaagggtgtcgattgaacgaacatctctataaaagaagacttttatttaaaataaagaggaggaaacagaccataaacaataacagtcataaagatttgcaagcaaagtatgatgatatgctcttcagaaacggactttgtttggggtttattcaaaaacaagggcttgcagatgtgtttttggagcatatgaaacaagttgcagcttatgaagaagaccaaaggtatagagttgcagcagttaattttttgagtttattagaatcaaattaaaacaaaaaggagatttgaaaatgaaaatttcaattaaaacaaggctaaatcctactgatcaatataaggttgacgactttattaatgcatttaagaacttgccgccagaaataagaattcagctttctatggacaacgggaacagttggctgttagaacaagtgtcagtgaaaacagaaagaatccttcttgattgtttacaagaagaaattaaaaatattgataatcaccctctttattctcatgccacttcattagggcaaactgtattccacaatactcatgaaattgtcgatgttgtcaaagagtatgtgaagaaaaatggataaacatatagagaaaatacaagcccatctaaaagaaatagaaaattttaaacaaggcctccaattattcagtgaagatgaagaagaatacataagcttattagctaagattcaacatcagtttgatttaatttcagacgaatcaatggaagggtttaaagaattaactttacatataagaaatacaggtcagaaaagaatccaacggagaattgatcagttacctcacacaatcaaagaaagtgtaagtgaagaaattaaagacatgaagagagccggcgagctttttgattgatatttaaattttaaacatggctatataaacagtgacaagtatcgattgggtgtgaacttaaatacaatacattgaaaactgtgaagaactggaggttttaatgtgtttagacaatatccaatatggtacacaccgtcgctgcatactttgaattacttgccacaatttacaccatacattgcccactttaatagtgctgaacgatgttttcaacgatgtatgtaccaaacgcatggcaatgttgaatggtgccatagaaactgctacgacccgatctatcaataaatttaaccagagcagttggatttaattcctctgctctaaaaaataaaatagggggatgtattataattacatactttacgttaatacttgcagcatacttatttgcactaaacattaatgaaattagattaattactcgaggggaacagaacgtatacgctaaagtcacacatttgctttctaactcaccatataaagaactgaagaagaataagaacttagtgtatgtcatgacattgttcaaggggatttcgttcattatccccttggctactattggactgattacgcatggtaacttgctaatgttagcttgaacagcttttgctttaatatataccggtttaacaatgtttaaaattcttgatgttttggacggtgactcaaacaataaacaaaacaagttcgtgtacatgctttttgtttgcggtaatattgtcttcgtggttaactttattatcagttggtttagataaaggagaatagaattatgactcagtttgatatgcagtacaacacaatcataaatgacataattaataatggggcatctgacgaagaattcgatgtcagaaccaagtgggatacagatggaacaccagcacatacattaagtgtaatcagtaagcaaatgcgctttgataattccgaagtaccgattttaacgactaaaaaagttgcttggaaaacggcaatcagagaattactttggatatggcagcttaaatcaaatgatgttgacgaattaaacaagatgggcgtacatatctgggatcaatggaaacaagaagacggtacaatcggcaaagcatatggatatcagcttggtaagaagaacagaatgctaaacggtgaaaaggttgaccaggttgattatcttcttcatcagttgaaaaataatccatcatcacgcagacatattacaacgctttggaatcctgatgaattagactcaatggcattgactccctgtgtctatggtactcaatggcttgtaaaaggcgggaagttgcatttagaagttttctgtcgcagtaatgatctcgcactcgggaatccgtttaatgtgttccagtacaatgtattgcagcgtatgattgctcaagttactggctatgagctaggtgagtatatcttcaatatcggagactgtcatgtatatactcgtcatatagacaatttaaagattcaaatggacagagagcagtatgaagcacctgagttatggattaatccagatgtaaaagatttttatgatttcacaattgatgatttcaaattggttaattataagcatggagacaagctttactttgaggtagcagtataatgctatctcttattgcttgctgcgataaatcaatggccattgggtatgaaaataatttgctttaccatattcctgaagacatgaaacgttttaaagaactcactacaggaaagttgtgtattcaggggagacttacatacgcttcaatcgtaaacattacaagaaagccacttcagaaccgaaagaatatcatattgactaaaaataaggatttcaagcctgatcactcttcatttgtttatcattcgattgatgatgtattaaagcttataagaggacaattggataaagatgaagaagtaatggtaattggaggaggtgctatatacgaggcattcttaccacatgctgataaggtttatttgacgattgttgattcagttgctgagaaggcagattcatattttcccaggttaaatgatgactggagagtaattgaaaaggatcacaggaaagcagacaacaataccacatttaattattcatttgtgacttactcaaaataattttagaataaaaataaaatagttatagactttttagaagttgaatgataagataaagacaagttaaaagcttgtcttttttttacatacttttagaataaaaataaaataataaataggagtggcgatatgaaaactgcaacagattatcttgtttccatttccaaacctcttgttgcaattgaggagactaaacaacgacttcaaaatgaaattgataacctttataaagagctagggaaagttgataaagagctcaatgaattttatcacaagctagaagaggacaaatttaatgcttcagagggatatcacctttcgttgaaaggtcaaaagatattgagaaagcgaagaagcttaaaacaagagctccaattactgaacacgcttttcggaagtttaaacaataatggatggactcttgaatcactgaagattgcagaatataaaattagcaaaaagaaaaacaagcatttacagtatgaatcggtttaaaaacaagcctacataattaaataaaaaagagagggaagccctctcaatgtattagtaattataatcccaataaacatcaacattaacttttacttgagctacactgtcattgttatgtgctcggacatacaattgttttcctgaaataagtgatgtgtttacgctaaatactttgtaaaattgttcactaatataatttccgccactcggtgtaacagaagccagcacagtgccatctgacttcattaattcataagtcacatttgcacttctacttcctgtccctgttgaccattgtttccccatgatggaaatcttggttacgttgtttggtgtaaagctagtgactactgttgcgtaagatgcagggcctgaagtagatctacctatgttgacttcaccaacaccatttttaacgtgagtatcagtcccaagagcatgaaaactaccggtgtttgttaagacctcaagattattttgaggggcggcaaccggctcacttttagcagtagcattcgctgacgcagctacaccagtaagaccaatagttgaaactaataaagcaattgctgttttcttcattaaaagcatctcccttggtttaggtatgtaatacaactatattataacaattaattttgaaataaatggagaatgttgtgaatatatggtgaattttctgaatggagtgtgaatttcttcggtgagaactttaaggaggtgatatattgcaacaaaaagagcaagaattgctgtcaaagaaagaacagcttgaaattgatgttttagaaaaggaagcagctttactccggctagaagtggaacaagaagattccaatctccacaaaattggggagatcggtgtacttaaagaatttcttttatacataaagaaatacagatcaatgtttactgtgcagcaagcagaagaatttagaaatatggatgaccgaatgaaagaaatcatcaaagtccaggttggacaagtaatggttgatgaagaagctttagagggatttattgaggaaattgagaatcaaattaattgaaagtgggagatgaggaatgaatgaaaaattaacgaaagatcaactcgaagaaatccgtcaacgtatggaagcgacaaccaaaggattttggcatgcaaacattcaccatgaatggccagggaacgaaaatcttcgttattggatagttactcttgaggatggtttagcagctgcagtaactaaagaagacgcggacttcatcgcaaacgctcggcaagacattcctaggcttctcgattatataactgagcttgaaaggaaacttcagaaaaaagaatatgaacttacagagtgtaatcgtgtctatttagagctgttgagtaaacaagagttcaaaacaactgaaatctaagtaaaatctgtattttaaagagaaggtgatgcagtgaaagagtcgttgaagaatgattttcaagagtttatgagtattgcaaaaagctttcttgctgtttctggagcagtcttttggttattgataatttcactcgtttttgctgggggctattaaaatgaatcaatcatataaagttagtctagaaaaattaccaattgaaagcttagagagactgaaaacagacatacaaaatagaattaatgatggattgcgtaccgataacaatgcatacataaaagaccaaagaagaaaacttcaaatcgttttaaacgagctggttagacgaagtacatttgttcactaaaggaggtgaatacaatgccagtagtactttatggatttggaagaggagcataaaaagagaggggagtaatcccctcatacattaatgaaattggccattcatgctttgttgggctaggcgaactaaacgttttgtgatttctccacctactgaaccgtttgctcggctagttgtctcaggccctaagttcacaccgaactcagaagcaatttcatacttcatttgttcaagggcaccagcagcttgaggcacaagtaattcattgctgttgtttgatctgttttgttgagccatatgatcatctcctaaagttgtatgtaaacaagcttgttcaattgtattgtgtggagatgttttgtaaatatacacattaatttaaagtgaggggatttaaatgtcaattggtcatggagcatgaattaacacgtacttaaacaaagaagggggataaaatgaaaatcgattatgtttcagatctgcatattaatcactggataccttgggacaatgaccaaattaaatgggaaaggcgaacaagggagattattagaaggctgatatcgaatggaaatggagaggtattaatcattgccggtgattttactgagtggaatcaacagacactgtgggtacttgatgaagtagcaaagcagtatgaaaaggtttacttcacatatggtaatcatgatctttatttactcagtaaaaatcagcaacgaaaatattccgattcattgggaagggtgaatgatttaattcagaaggctacagacatcaataatgtcactccattaataaagtctacggatacatacaaagggaaagtctttgcaggagatgttatgtggtatcttccaaaaggaaatgaaggatgggatttcttcaaaggtgtctctaatgattcaaactatatcagccttaatggatacagcaaagaagatggggtacgagcaatgtggaaagaatcaatgggctggtatgacactcttgaaaactctcacattgatgtatttgtctcacatgttccacctgttcacaatccttattctccgtttgagcctaacagctgctatatggttgatgtcccgttcattaacgcaaaacattgggtttgtggtcatgatcatttacaagctgagtttgacaatgatggaacgagctttcacatgaactgcattggatatccatatgactatgatatgtatcctagagtaaatgagataccaggtaagcaagttgatacgtataaaacgtttgagctgaagacatttgaaatcaaatgaaattctaattttatacagaagggagaaagtaaaatgtctaatgtgaaaattaaatatgttacagactgtcatgacaaagagtttacattaaataaaaaatatgattttcgtataaccgatgatggtattgaaatcattgatgatttaggtgaagaacatatcattgcaactaaagacaatgaatatggggcttatgaacacgatgaatttttcagatcaagatttgaatttgttgatactgaataaaatgttgatttcatttagaagggataagttcaatgaaagagattgaatttgatgaagttaagaaatttgttgaagtaatgtctagagaatttagatcaacaaagatgatgaaaattaaaattagctatgctgaatggttagttgatgaagttgaacgattaagggggttagtcaaaagtgagcaatagtttagagagaaagattaatattcatttcagtaatggctcacatatcgagtctaaacaactttctaataaactaagggggtacaatagcaatttcttatgggagcaaatgcaagagagtatcacaaaggaacttaaatggtggggagtcactctaactggaaatcagaaaactgtaaaagctttaagtgagctaatgaccattaacaaaacattgtttgagaacctttataaggtgcaatcagacaccatagaagagcttgcaaacaaattatatgaacaggttcctgagtatgagaagaagtttttgaagtttgtcaatgaacagatacctaatctgaggatgtgcctacagttcgagctaccttataatcctcaactaatatccagcatagaatatgaaatttacatatccggtgccgaaattgattgcgaatacccacatgatgctagggattgcattattactttctttcaacggataccagaaataatcggttcatacaaggaggaattagatgaagaatacagagtttaaggtaacaagtttattagaggagtataaacgaagagatgaggaacgtagggaattcatcattcatgaaggctacagagctatcgaagagatcattaaagaagtgaaccaaagaggatcactaaatgaagcagatatttattatggaacacctaaaccacagttaagcttctcggacgtcgaattaggctacatgcttacttctatgatggaatatgctacaaatcatgttggaaatccagttgatgaggaatgtgaacttgaaaataagctggcttactttgagcataaggacgaaattgttcaagtttttgaagtatatggacaaggtactgacagctggtttttgaaaccaagtgacgataccgtttataaattgaataacacagcttacggagtgtatttaaaccagttcgatgatttcattaattacactaaaaataaagacaatgagagtaaaaaggtttcttatggtaccacgatcttaaatgacattgccggcggatatacagttggaagaggttctaagtagatgatcgttacagcttggattttgtttgttgcatttgggcttgttttgttagcaagaatggattccgaagggaatcttaaatttgcagtgtatattggtgtaattaaatttgtttcagttttcattgttgccattgcagcaggagtgatttggggagggttatttcaatgataaagaggattatgagttttaagtttgacgactggagacatattttctacttattaaaaagtgtagcgaagaatttctttaaaggtgattttcatgaagcgagcgatgcactttattggatacgggtacacttgtcttttgaatcaaataaggtgaagtgaacattagataaaatcggtcatttatttagagtaaaaataaaattagatgattagaggtggagagtaataactgagtacattaagaacattcaaatactgttcaacaaaatggaaagacaaatgggtacggtgaaagaagctctcgagaacaaagaatacgaaagagcccaccgtaacctaatcaacctttcggataataatgaagaattgatgcaggaaatcagatgggctcggaaagggattaagatttaacttttcttctttcttcgtggttccattcgtacagctcttcaattgagcaaccaatggcatcagcaaaagtcatgccagtagctaagttcatatttgctttagctccacttatataatcgtggatacgttgtctggggtatcctgtacgtttgaaaaggtcatcaactgtgaggtcatattcaaacattaattcatttaaacgagggcgcaggggtgtccattgcttcatttcgaacacttctttcaatattaattaacataaaacagtgtagcaaaggtttattctaatttcaattttagtttcaatattttaggagagtgattgattgggaggtacaaaccaaggcaaggtttttgaagcaaatatagaaaaatcagctgcaggtcaaaagctgttcttctatagaattaaagatgttaatccagtgtttttaaaaaggggagctgcagtatcaaaaaacaaatatgattgcttcttgcactttaaggggtacttattcccattagagcttaaatcaacaaaggataagtctattgcctttcaagagaagattataaagccgcagcagataaaacacttaaaagaggctacgcaatatccaaacgtaatccctgggtttctatttcaatttagagagccggaaaataaagtttatttcgtacatattaatgatttccttacatataagaacatagctgaaaaacaattgaaacatacatataagaataaagtaaacaaagccagcattccaattgcaatttgtgaagagatcggcacagaagtccgttcgatgaagaaaaaagttaactatacatattacttgaataagctttgcgatgatttgattaaaaaagaacagcagagtgtgagcgctgtatgagtgaattcgttaaatcatcttcaaagcaatcgtttgaaatagaaaaatatcatataacgattgaaagcataaatcaaccatcagctgaagcaattaagaaagtcaacctaaaagtgaatgaagtaatgtctaatttattagcaaaagaaaagagccattaagccggctctttttttgttgtacttaaactataatacttgtgacgattatcgggatgaccttaatgccggtcgcgatgaatcatattgccggcggggaaggcagcaaggatttcggtgatccggctaaccttgccctcggatttacggtgcttgtcatcatcgtgctgctttatcggtttacaaaaggatttttgaaatccatttcaattttaatcggcattgtcatcgggacggccatcgcatattttatgggaaaagtgcaatttgacaatgtggcgaatgctgacgccattcaaatgattaaaccgttttatttcgggacgccgacatttcatgcggcaccgattattacgatgtcaatcgttgccattgtcagccttgttgaatcaaccggcgtctatttcgctctcggtgacctgacaaacaggcgcctgtctgaacgtgatttagcaaaaggctaccgcgcggaaggtctggcggtgttcatcagcggcattttcaatgcttttccgtatacggcctattcccaaaacgtcggcctcgtgcagctgacggggattaagaaaaacgcggtcatcggtgtcacgggcgcacttttaatgctattcggcctttttccgaaaatcgcagccttcacgaccatcatcccgtcttcagtactgggaggcgcgatggtggccatgttcggcatggtcatttcctacggcattaaaatgctcagtcaaattgactttaaaaagcaggaaaatcttctgatcgtcgcgtgttcggtcggattgggactcggtgtaactgtcgttcccgatatgtttaagcacctgccgtcttacttaaatctgctgaccacaaacggaatcgtcgccggaagctttaccgccgtccttttgaatattgtttataatatgattcctaaaacgaaaaaaacccttgatgtgacaagggttcaagagggttagttatccgtttttcttaaaaaaataacattttaataacatttctttatgaaatcccgagatcgaggatgcttccgaaagtttgctgaactttttgtgaggcatcctctttttttattagtttcattgtttgaaaagaaataaattgagtgatgcggcatccgccttatttcgccgaacaaccgtcccgaactatatgtacgtgaacatatgactgaatgtaagaaaaaaaggagaatgggggatcatatcataaacgaatatcattgttcggacggtgatgacacgaaacttggtttagacatggaatgaaatgcctgatgccgaagtgcaactgcagaatgggcgctgagggggagtgtcttgtgcacggatccttacaaaagagagtgaaaagaaggggaagccccttcttttaattaatccatccttcaaaagttgcgcgatagaacccttcgattatctctactttcttaaggtaataagtaacaccatttttaacagttgtatttgggatatcccatctatgaaggtaatccattgtaaaagaatctttgatcgcttgtgtcgaaatttttgtttcagttgagtcgctatttgtattgccagggctggatgcaaaagcaggggaagcggaaacgagtaaagcgagagacaaggcagaaccagttaaaacttttttcaatttcattttaaacactcctttgttttttaatacaattgtattattacacaaaatacaataataaccaagaggttttttgttaatattttgtgggcgcagcgtgaatttttttaggggagtggatggcaaaaggggcaatcctttcatccgctgttgcagcttatttcaggatactgatatgtatatagagaaaaagagttgattattgctggcctctggtgagctgcagcctttgagtgagtgtttgatttagctattccagcgcttttccaacgggaaaggtgtgatatgaaatttaaaactgaaacaattgtacaaaagtaaaaactttatttaaaatgttataaatactaattttcaatataggaggttatctggtggcagaaaagaaaaaagctttaatcattgtggatgtacaaaaagctttcgattataaaaaatggggagaacgaaataacgtaaaagcggaagaaaacattagtaaaatactgaaattatggagagaaaaaggatggacagtcatatacatacaacatatttctgataaacctggttctttattttatccaaaaaatgagggggttgctataaaggagatcgttaaacctatggataaagaggtcattataaccaagaaagtaaacagcagctttatcgggactaatctagaagagattttaaaatcaaatgatataacaactgtcgtaataactggtttgactacgccccattgtgtttcaacaactacaagaatgagcggtaatttagggtttgatacctacctcatttcagatgcaacagcagccttcggaatgaaagaccaaaatgatacatattatgatgccgagactattcacaatatatctctggctacattgcatgacgaatttgccacaatattaacgactgatcaattaatcaatgattttataaaaacaaactgattaacattatagctaaggccggcggtgggtatagcggctgaaaagcatattcaggcgcatacaaggatctcgtctgaaaaaaggcatctgcttcagatgtttttttgtttcttgaaaaacgggctggtaaaaaatgatcggcgcggttaacggtctgattcggctttggttttgaataacaaaaggttttactaatcagcgaattattcaagattttttggcttgtgctgagtctgtgtcttttgatttcctcgaatagattggcttgatcatctttttgtggctgaggctctttgttaagacattttgggtcgatcacatttttaaaatctttgatggttaaaggcttacagtcatcttttaattcgtagcctaattgtccattagcttctaaagtggcatatttaattgaaatgccaagaagccttaaacgcatttcgagttgatctgctgtcagtctcagcttctttaagttttgtatattagttggccgtcttctatatcgaatttagattttccggttaaaaaaaatcaatccagtttacttttacttgaaaccattccatcaaaattaaagcactaaaaggatagacgcagcgattaatgttttcaataaactggtttctaaaatgggatgaacgataatcgtaccgattgaaatcatcaccattgtctgtgcgatggtcatttgtgcaatggattttctccctgaaattctcagtaaaatcattccgaatgcaattataattaattcttcccaagcaaatctcatgttatcaccctagattgtgttttatcaaaaatgaaagagcaagtaagaggtttcttaacgttagctggggaactcaggcgtcgataaaatgttctggattgatagagttgagactcggcttttggatagacacgcgggagagaattttagtttatgtgtttttgcgtctaaaagcagaaacattacaactaataatgatcatcggatgtaataaaattacgcacctaggtgctatatgctggatcaattataaaatggagtgaaactaaaaaaaggggcaaagcccccttatattagcagctttttagttgttacttgagacaatcattccgccgtcatgaaaaatcagcttttgtagacggctgtccaagtgccatcagcaccatggaaggtgatgttgtctaaataataggtgattccattccggtaaattgaagtaggataatcagggccataaccattaagtatgaacgtcgccaaagcagatacttccttcgttttgctttctgcagaaggtgtatcagcaggacctgcggcaaaagcaggggcggcagaacagagtaaagcgagtgacagggctgagccggctaaagcttttttcattttcattgcaaacactccttttcttttttaatacaattgtattattacatattatgttaaacatgtacatgcctatctttgttaattttttgtgaacaaacagataatctatttaaacgcagagatgtaataagtatgatgatgaagcaattatcatctataaaaataagatcagaaagcagatgattttctcgaaaatcatctgctcttgcgaaatgaggagttacatgacatttacggaacgggcggtagccattatcaaacagattcctgaaggaaaagtgatgacgtatggtcaaattgccggtcttgcgggaagtccgcggggagcgaggcaggttgtgaggattcttcactccatgagtaaaaagcatcgtcttccttggcacagggtcatcaatgcaaagggtgaaatcggattaagagatgaagagatattttctgtacagaagctgtctcttgaagctgagggcgtagcggtcacgtcagacggacggatcgatctcaatttatacgtccatgatccgaatatgtaaaaaacctgccgtatatatcggcaggtttttcagttatatgctgcaagccggccagaaaggttttgccggatataaggccattcctcccgaaggatggagtagtaggcggtatctctgaggccgccgtcgacagccggaatatgcgcgcggcggatcccttcaaattgggcaccgatccgcaaaatcgcagttcgtgagcgctggttgcgaacatcggttttcagcgtcaccctgacagcttgccacgcgtcaaacgcatgggtcagcaacagaagtttacattccgtattgacaccggtccgctgtacggcagaggcataccatgtgctgccgatctcacacacttccggggctgcgtccgccggccgcgtaaacacttccgcatccataaaccgcgtacttccgacgattcggtctgtttcaagattccgtactgcaaatggcaatgcaagtcctttttcataatcggaaagcgtacgttcaatataacgctttgtttcttcgattccgtcaggaacatgggtgtaagcgtaagtcgtcctattttctgaagcagcttcacaaagtgcctgagtgtgatcaatcgtcatcggctctaactgaacgagtgaccctttaagaatgacgggcttcagcattcttatcacaacctttttttatgaatggatcaagtatagtcgagcggcttatcattcaaaagggccaattttaaattaaaatggcatgtcagtgaaatcctcgcttcaaacttatgcatacattcaggaaaaaagcggaaacctttatgtgaagaggtgatgggcatggcatatgtgttatcggtcggaaccagcattccggaatatcatgtctcgcaagaaacggcggcggattttgcgagagggatgtttgccgattcatttaaggatattgaccggctgttaaaagcctttcaaaacggcgaaattgaatcaaggcagtttgtccggccgattgaatggtataaaacggcgcggggtttttcagaaaagaaccggctgtatacggaagaaaccgttaagcacagtgcggatgcggcacttgattgtttaacaaacccggattgtttaacaaatccctttccttatgaaaaagtggatgcgatcttttttatttccagcaccgggctttcgacacccagcattgaagcgaaagtgatgaatcagctgccgttttctgcgaaaacaaaacggataccgatctggggcttaggatgcgcgggcggagcggccggcctgtccagggcgtacgaatactgccgcgcatatcctgaagcatacgtgcttgtcatcgcggctgaactctgcagcttaacgtttcagccgaacgacaagtcaaaaagcaacttaatcggaacttccctgtttgcggacggaattgccgcagtactagtcggaggagaaaaggcgaaccgaaacgacgtcaaacagccgcttcttccgcggatattcgccactcaatcggtgatgatgccggatgcggaagatgtgatgggctgggaattcaccgacagcggttttcaagtcattttttcaagagatattcccaccctggtttcacagtggctgaaggacaatgttgatgaatttttaatagaatatggtgtcggtcctcacgacattaaaacctttcttgcccatccaggcgggaaaaaggtcattgacgcctatttaacgagtctttcaatggacaccggtcagcttgaggcatctcggaaggtgctgcaaaaacacgggaacatgtcttccgcaactatttttcatgtgataaaagaacagttgctccgcggccggcagaaagaaaacgaaaaagggctgatcggcgctctcgggccgggattttcgtctgagcttttgctgttcagctgggaaaagggggcttcttaatgttttggctgtttatcatgctgcttgcggcccagcggattgcggagatgatcgtggcccggcgcaatgagcagaaggtgaaaaagcaaggcgcagtcgaatacggagaaggacattatctctttctcgtcctgatgcacgtgctcttttttgtctctcttacagctgaggtggcggcgtttcaaaaaacgctttctccaaggtgggccgccattatatgtattattttatttgtacaggggatcaggtattgggctctattatcattagggcggtattggaatacgaaaattcttgtcgtgccggatgcggagcttgtcagaaaggggccgtacaggtggatgaagcacccgaactacgcggtcgtcatcttagaatttatttttctgccgctgttatacggagcgtattggacactgtttctcttttcgattctcaatgcctgcatgctcactgtaaggattcgcgccgaagagaaagcgctagaagaaaacaccgcaaaatagagattgaaaatcattctcactcatgataagatgtaaatatgaaaatgattctcattcaaggtggtgccgaaaatgacaatgttatttttatttgcagccgtttgtacatacagtgttttaattggtttcgtattgaaaaaagtttcgaataaatcgatgtcttcttaaacatctgcggtttttaatgccgcgggtgttttttctttatcagctgccgatatcggcggcttttttacgtttcctgaagaaaagtgggccattcttgtgtaaaatgggggagaggtttttttcagagctttctaaaaatgaaaacgtcatttgatgcgacagacacaaaggggttaagacacatgacagaagaagaacgccataacagggagattttcagcagaacgggtgccttatacgtacaattattggatcaccaggatgaaaaacgggccgatcagctcgcggccattatgaaaaaagcggctgatgaagaggtttatatcgcgtttaccgggcattattcggccggaaagtcctctttattaaacacattgctcggtgaagacatactgccgacaagcccgattcccacaagcgccaacctcgttgtcatccggcacggtgaagataaagtcgtgcttcatacgacggacggggcttatgcagaaattaaaggaagttacgataaaaaacaagtgcagcaattctgtaaagacggtgagcaaattgaaacggtggaagtctatgccggctttaaggagtcagagccttatgcggcctacattgacacaccgggaattgattcgacggacgaagcgcattttttatctgccgcttcggttctccaccaggctgacgctttattttacgtcgttcattataatcacgttcattcagaagaaaatatgctgtttctcagctccatcaaagaccgtattccgaatttgtttctgatcgtcaaccaaattgacaggcatgatgaaaccgaaacgaagtttgaagagtaccgcaggcaggtggaagatatgcttgaaggcgcgggaataccgaaagaatcgcttttctttacgtctgtcactgagcctgaccatcctttaaacggcatggaacagctgaaaaaacatctgcagaagctgaaacagcaggcaaaaacaaatttatggtccttaacggagagaaaagtcgcacacttagtcaaagagcatacagagatgctcgtaaaagatgataaaaacggaagcggagagcagtttgacaaacaagaagcacttgtccgttctgttgaagatgagcttaataaagccgttcaacaggctgaaacagcagagaaagacatcagaaaagacgtgcagaacatattgcaaaacgctaatttgacaccctttgagatgagggagcttgcatctgcttatattgaatcacagcagccctcatttaaaaccggattattcttttcaaaagcgaaaacggctcaggagaaagagagaaggcatgctgaattttttgccgatattaaaaaaagaacggaaggggaagcggattggcacattatcgacacatttacgaaagcggccaagcggtatgaagcggattcggacgaactgatcaagaaaatccaggcgtaccgcacaccgctttctgatgatatcaccgctcaggcccttaagcagggagcggccttttcatctgaatacgtattaacttatacgaaagacctcgctgagatgatcagaagggaagccaaaagacagacagcggaactcattgagaagcttaccgcttatgttcaggcaaaaaacggaccgctcattgagaacttgaaaaaccggctcgaaaaagaaaagaagataagggatgagctcgcgcaatcggcaaaagaagaacgcaatgccttggaaaaagcagcccgggtccgcgctttgtgggaagaagaattgacctgtgatacgggaagcggcgactggtatacgcgaaaaaaacgccttgcaaaagcgcccgtccaaaaagagaaaccaaaagagactgtacagtatgaagtaaacaaacccgaaaaaaatgcgatgaaggaacttcctataaaagagcagactgatcggttctatgagcttgccgggattcttgaatcctcgagcatattaggaaaacaggcagaagcctttcgaagcaggattgagcggcttgaaaaccgccagtttaccttggcgttattcggcggattcagttccggtaaatcatcatttgcaaatgcgcttgtcggtgaatacgtgcttccgtcatcaccgacgcccacaacggctacgattaacaaaataacgaaaccgcaagccggcaaaccgcataaatctgcggagatcgtttttaagacggaggaggatctggacgctgaaatgcttcagctgactgagctgaaagacgctgatgtaaaggggcgttcactgaaagagagatggaattatgccattaaaaaggggaaagttccggatgaacttatcccggtgattcagacgatgctgcaggcgtttgatacgtatgaagaacagatccgtcaaaggcagacactgacggtgccggtggaagatttaaaaccgtatgctgccgaagaaaaaacggcctgctgcgtaaaagaagtcaccgtgtattatgattcgcctctcacgcaaaaaggcatcacaattgttgatacgccgggagcaagcagtataaacaagcgccatacggaacttgcctttcaatatataaaagatgctgacgcgttcttttatatgacgtactatcagcattctttttcaaaaggagacaggtcttttctgaagaaactcggcctcgtcaaagaatcattcggcatggataaaatgttttttgtcattaacgccgccgatctggccaaaaccgaaagcgagctggaaaccgtcaaagactatgtccgctcagaactctcaaaagagggaattaaccggccaaaattatatcatgtctcaagtaaagaagagcttgcgggtaaaaaagcagctttttataacaggttctctgatgtaagaaccggacttgagcactttattgaggaagatgtaatgagggccagctgcgcccagctgaaaacagaggcggacaaattgtgcgatatggtggaacagcttcacgaatctcttcaccagtcggcagaagaaaaagagaaaaagaaacagcatctggagtcttcctatgaaaaagctctcgctgacatttcaaagcgccgtacgtctgaggtcatcattcgaaaagtgatgaaagatacggaagaacagctctatcacattaaacatcgcctgacattttatgcgaatgatatgctgaaaaccgccttccatccgggccttcaaaacggcgattggaaacaaaatatagcagcggcgctgaatgaagcgctcaaggaattccgttttgaatatattcaagagctgaaaacgctcgatatccggatgaccggttttattgagcgccatatgactgaggaatggatggaaaactgtcagaagaagcttatggaagacggagatttctccatttatgtgagcgccgaaaacgaatttgccgttcagctgaaagaagtcgctccggtcattgacgtctcggcattcacacatcacataaaagaagttaaatcgccgaagcagttttttgaacagaacggaaaagcagcgtttgtagaagggctcaggctcagcctgcaaaaagtgacagaaaagtggcttgagcaggagaaagaaagcctttcagagcgatatactgagcaggtgcgccgtctgcaagaagacatggcggataaaagcctgtcccagatccgcgagcagcgggacacttatttacaaggtcttgcggaaaatacgagtgcaagggaaattgaacacctttacgaagccgaaaaagcatggaaaaagaaagatgaaatgctgaaaatttaaaaatccggttggcgggcagataacagtcgtggtagactaaaatgaaaaaagcgagatgaaaccttttatgtcagaagtccataaagcaatttcagcacattccgcaaaacagcatcagcacgtcaaaacatttgtacagcttgactaccagcgtgaacaggccattgaagaagccattgtaaaatgcagacagaatgaaccgttcacgacagatgccatcaatggcattaccgcaaaaatgaaccagctggcgaaaaagggcatcgtgccgcaaagacgattcgtaagtgaagagatggtgaaagaattcgtcagcagacagtaatggatgaacctgccgcgtgtgtcatcagcgcttgctgtacatactatccgtatcttctctaaggggggatatgacaatgggcagaacaaaactgggaaacagaaatgttcagcagaataacaatgccaaaaagaaaaacggtttcggacagaaatttgattcttatgccggccgtgaagctgaaaagctgatggcaagcaataaaagacacggtgagtaacgtgacggcagcatcttccaaatggggggatgctgtttttttaccgccttctttggtaaaataggaacattgaataaaaaaaggagtttcgatatatgaataacaaattactgctcgtggacggcatggcgcttttgttccgctcgtttttcgcgacggccgttcatcgcaattttatgataaatgaaaacggaatcccgacaaacggcgtcaacggttttttaaagcatctcattacggcggttgatacgtttcagcccacacatgtcgtctgctgctgggatatgggaagcaaaacgtaccgcaatgatttgtttcaagattataaggccaacagaagcgaaccgccgcttgagctgattccgcaatttgatttagcgaaagaagcagcgcgagagctcggttttttaaacatcggcataaaaggctatgaggcggatgactgtatcggtacgctttctgccctattttccggagaagcggaaattacgattgtaacgggtgataaagatctgcttcaattgatgaatcatcaagttcaagtagcgctgctgcaaaagggtatcggcaattataaggtatatacagatgagatattcagagaagaaacgggggttccgccaaaagcgctgattgacattaaggcgctgatgggagacacgagcgataactatcccggcgttaaagggatcggggaaaaaacggcgtacaagctgatccgtgaatacgaaaacatagaacggttattagaaagcctcgctctcttgccgaagggccagcaaacgaaaattcagcaaagcttgaaagaattggagctgtcaaggcagcttgctgaaatacattgcgaggtgccgttagtctgtacgcttgaagaagcgattttttcattgaagatggaagaagcatccttaatgctcagacgccatcagataaaaggaattgaaagaatgctcgaaaagctgaacgccagagagatcagctgatccctctagcgttttgtattgcttttttttgcgttgttttcaagggctgatttcgggtctttatgcgcatttccttccatatttccctgaggattcacgcccccggtctgccggcctttattttcttttctcatagctgttcacctcatttgtaggatgaacagtgaaacgcaatttcattccggttatttattcagccggaccgctttttttgcgagctgatcggctgtttggttttgtctgccgggaatccacttaatgaaaaacaatggaaatccggcctttaagcggatgatttcatccacaaacggctggaaagccttgtttttaaccgcttcaagttccgcggcccgctccacgatatctgaatccgtccggaatgacacggactcaaatccgcgggcggcacacagcttcattccttcaattaaagcgagaaattcagcttcctgatttgaatggtcgccgatcggaattgagaaagattctgttttcccgtcatgtttaataaaaataccgataccggaggggcccgggtttccggcgcttgcaccgtccacgtaaatttcagcaggcatcatccgtcactctcccttcggtgtcattcgttttgccgcatacgcataagggacagaaatgagtgataccgcaaatttaatcaggtaagtcgaaataaagatgctgaaccatacgcccgcggaataaacgccgataaaggccacggcagtgaagataaatgtatccagcagctggctgagcgccgtgcttccgctgtttctgagccagagaagcctgtctgaaggaaagattctccgaatggctgaatatacataaacatctatcgtttggctgaaaataaaagccaagaggcttccgagtgcaacacgcggcagaaaaccgaaaatcgtctcaagggcaggctgcgcgatatctgacgcagccggtttatataaaagagccccctgcatggcgcatgtcaaagcgagcaaagtggaaaagccgagccagacggctttgcgcgcttctctgggaccgtatttttcattcagcacatccgttgcgaagaaaacggtgccgtacatgatatttcccagtgtcgccgtaagcccgaacagctcaactgttttgacaacctgcaagttggcgcacaccgtggcgaaaccgatccatacgaataggcccgttttgccaaatcctttataaaacagaagaacaatgataaaatgaatgaccgcaaataagatccataacacatcgttaaacaaaacctgctgacttcctttcaatttgagaatggtttgattatagcacacgcccgtcaactaatgaatggtaaggtgatttcaatgaatcttaagccgtatatcgaaatagaagcaaaaggaacaggccctgtcgcgtttttttccgaagattggctgaccgttccgaaagcgcgcatgcttgcaagagaagtcagccgctttccttatataaaagacatttattttgaggatgaaaaaggcgcgagctggacgcttaaagaattagaaaagcttactgaagaacttgcgtacgaacctgacgacattacagtgtatttcgacggcggctttgacaaaacaagcggacgcgccggactcggaattgtcgtgtattattctctcggcggcaagcggcatcgcatacggaaaaacaaaagcttaacgcttcagacgaacaatgaggcggaatatgccgctttgtacgaagcgcttaaggaagtgcaggaacttggcgcaagcagaaattcaatcacgataagaggggattccctcgtcgttttgcatcagcttgacggcagctggccgtgttatgatgaaacgcaaaacgaatggctggataaaattgaagcgctgctcgaatccttaaagctgacaccgacatatgaagccgtaaaccgaaaggaaaatcaagaagcggatgaccttgccagaaaaattctctcggaccggcagattgaaagccgcataacattagaaggtaacggagatgactgatattggataaaaaaagcatttataaagaattgacagagcttcaggatgaatattgcaaagactgtttcgtaaaaaagcatttccgcaaagagtttggaaaaacgcacgctcattctttctgcatcaaccaatgcacggtgggggagaagctgaaagcctacggcaaggtgctgacaaatcaataaaaaataaaaccgcagcttctgcggttttatttttcgaattcatcaagctgatgctggcaatcgtcgagaagcattcgctgcttttgcagaaaatcctggtcgagagcttgcagttcactggattgtgacatcgttctggcatcctgaatcgcctggtaagcagactccaccaaagttgaactttggccccgggtagccgctcccgttgttttctgggccgtttccaccgctaattcaagctggcgtttatccgtcagtccgtttggaaaaaattcagagtccattaaaaaacacctccgcaaatagtttggagattttttttagaaatatgtacggaaaatagaaaaaaatatagaaaataagccgatataactattgaacctgattaattagggcttatttactattattcagggtatcttgggagagaagggaaaaaccagccgtgaatgataatgatttaaaaacaatccttcagcagacatttaaagaaatatacggtgatctgggaagtttagcggaaatggcgaaaaaaggaatgccgtcaatggagaaacaaattgaagaaatcgagcagcgctgtaagcagaatcttgtcgcaattgagattcagacggcaatcaaataggagaggcatacgcctctcctctatttgtcatctgatcaacatgtattgagtttagagttttacaacattagaagcttgaggtccacgattaccttcgacaatttcaaaagaaacttcttgtccttcttctaatgatttgtatccttctccttcgatagcagtgaagtgaacaaatacgtcgtctccgccttcaacttcgatgaagccgaatcctttttcgttattgaaccattttactttaccgttttgcatattgcttaattcctcctagtactgtagcaccttcgtgctaaaaaaaattttgtcatcatccaaccgtacgtatgtaaacgttgttaaatgatggttcaactatacaccatatgggagcgggcgtcaagcggccgctccctattttttatctttatttttccagtaacaaagcttaaccggaaaaaaacaaaaagcacacgaatcgttcgtgtgcttttcttttacgataatgccatatccgccttcccggccatcatttcagattcttttataatgtcctgcaaaatgacttcagaagagttggggaggtgaaggcttttaatattgctcttcatccggttcagcttctcctcatccgcaagaagggaggtgacagactctaaaatttcttcgtggcggttgaccacgacagccgcaccgcgatcttcaaagaaaatggcgttttccttttcctgtccgggaaccggtttgtacaaaataacgggtacgccgatcgccgtcgcttccgtcagtgtgatgccgcctggttttgtgatcatgcagtccgtaatacggaacagctcgtcaattctttctacataacccagcactttcagccggtcggcattgtcaccttccaagctgctgagggattctttcagcgagctgtttttgccgcataccaccacaacctgcacctgatcgtcatgaacgagattttcgcacagttcttttacgtttttcagcacaccatgcgctcccgccataataagaagaacttttttgtcgggagagagattgtattttttataaatcggctctttcggcatcgattcctcgaattgaggcctgatgggaatgcctgtgatctttacgttgttcgggtgagtgccgatttcaatcagtttttcctttacgtaatctgtggcgacataatatttatcaacattttcatgaacccagattttgtgaaggcagaaatcagtcattacgttgaacgtggggatcacttttccggttctccgtctgtattccggtacgacaatcatcggaaatgtattgataataatgtccggcttatgctcttcgacgagctggcctaaacgtttatttcccattttaaaataaatattgaatttgcgtttattatagattttgtcaactccgtaataaaacaaacgataaaactgtttcccgattgagaagctttttaaataaaggtattgagtaacctctgaaacaatcggatttgactcttgatacaaattggaaaccgtcacatctaagccgagacgcagacattgttcgtagagcgttttggccacttgaacatgcccgtttccgtaatttgcagtcaaaattaatacttttttattggtattcaagtaaattcacctcaatgtaatcaacaacaagcaagcttcatgcatcgtaaggagttattgtctatagataaacataacacaagtgcatcattttataataagcgcgccaacatatttaaactaaatttaattgatatgttccattattttaaagttttgttatacgcatactgaatcaagagtattttatcatatttttgtcaccgtatcacttaaaacaaaaattaatcccattcatacggagtttcctgatatacgtaataattcagccaattcataaacaataacgttgcatgagctttccagcggttaacaggttctttcccgccgggcgcaaaatagtgcttaggagcttctacgtttgaaagatttctctctatgtctctctcatactcctgaagcagcgtatcggtatcatattccggatgacccgttaagaaaatctgtttttcgtcttttgaaacgattaaacagacccccgcttcctctgaaacgctgagcacattcagatccgaagccgattgcagctgctccgtattaatatctgtatgccgtgagtgtggcacatagtatagctcgtcaaatcctcttaccaatctctcatgttttttaagaacggtatgctcaaacacaccgaagatttttttcggcagctccactttctcaatgccgtaatgatagtataaaccggcttgagcgccccagcagatatggagtgttgaagtgacgttcgttttgctccattccatgatttccttcaattcttcccagtaagaaacatcctcaaacggcaggtgctcaatcggagccccggtaataatcattccgtcaaaccgtttgtggcggatgctggaaaaatccgtataaaattcatccagatgctgccttgccgtattttttggagtatgtgtgctcggaattaaaaacgtaaagtgaacttgtaaaggtgaattcccaagcatcctgaggagctgggtttccgtttggatttttttcggcatcagatttaaaatcacgatcttctgcggccggatatcctgatgaaaagcccggctttcatccattacaaagatgtgttcactttcaagcacctgcttagcgggcaggtgatttggtatattaataggcaacatgccacctccgttattccccgttaattttcttcattatagaaatttttaagccatttttcaatccatcccggcgtaataaaccgtatttaacgcataatgacagggataaaagcggcaaatgggtataaattcggagcggctcttttattatgacgggtaaagagccgtttggttcctcgaaaaaaacgttttccgttaagtggaaggaaaaagcggttaccgtttgttttgcagtgtaaaacaggtaaaataaatgaagaatgtaaaaaggagggccgcagatgacaatttacgatataaacgtacggaccataacaggcgaagacatgacgctatcggcttacagaggcaaggtgatcatcattgtgaatacagcaagcaaatgcgggttcacatcccagctcaagcagcttcaggagctctatgatacatatcgggaggaaggtcttgaaatattgggatttccctgcaaccaattcatgaaccaagaacctggaaatgaagcggaaattcaagagttctgtgtgaaaaactacggagtcacattcccgatgtttgcgaaagttgatgtcaatggggcagacgctcatcctctcttcaaatatctgacggaacaggcgaaggggatgctcggcacaaaagcggtcaaatggaatttcactaagtttatcgtggaccgaaacggtgaagtcaacgggcgtttttcaccgaacgtcaacccaaaagagcttgaagatacggtgcagaggcttttggcccgataagaggtgatacggtgaacgaaaaagagcagctggaaagcgtcaggaattgggtcagagaaaagcttatcaatgaacgtacgggccatgactggcttcatatttcccgggtcgcaacactttctgtttatatggcaaaagaagaaggcgccgacttatttatcactgagacggccgcgctggttcatgatctgattgacgccaagctcgaaaaaagcgaaaggctgacggcaggcgaagtgacagaacggctggctgctttcaacattgcggctggctccattgaggagatcgcggatatcatcacgagaatgtcattcagacacagggaactgctgataaagcggccgctttccttggaggggaaagttgttcaggatgcagacatgcttgatgcgatcggcgcagcgggcatcggcagggcttttatgtttgccggcgcgaagggtcacccgatgtacggaactcaaacaagtgtgctggcccatatagaggataaattaatcaagcttaaaggcttaatgaatacaaaagcgggggcgggtttagcagaggagcggcatcaatttcttttgcagttcgccgcccgtatccaaaaagaggccggcatcggcaaaagctaagcggcgcaatagaacgcttgtgccgactatgttagaataagtgtcagattgcgcataggaggaccaatatgaagattaaatcaatagaaccgacgccgagtccgaacacgatgaaagtgattttgactgaagagcttccggcggggaaaagcaacaattacaagcctgatcaggcagatgatgctccggccgtcgtacgtgatattttaaacattgaaggagtaaagggtgtttatcacgttgccgatttcctggctgtggagagaaacgcccgttttgactggaaggacattctgcctcaggtccgttccgctttcggaatggaacatacggagcagtctgagagccgttctgaacaggaatcgttcggtgaagtgaaggttttcgtacaaatgttcagcggaatcccgatgcaggtcaaattgacggacggcgaacgtgaagagcgcttcggccttccggaacgtttccaagaagccatcttaaagctgcgttccgaagcttcaaatgttgtatttgagcgggcttggaaagaacaaggcgtgcgcttcggggattttaccgaaatcggacacgatgtcacagaagagcttcaggccgcctacagtgatgagcggctcaaacgcctgacagaagcagccgtacagcaaaagggtgaggccaaaccggcagtgcagcggaaagcttataaagtgactttggaaatgctcgatgatgaagactggaaacagcgctatgcccatcttgagcaaatggatccggatgaagacgatttaccagtattagaaaaggcgctgcatgatccgaagacttcgatcagaagacaagccgtcgtttatttgggaatgatcgaaaagccgtctgtgcttccgctgttatacaaagcgcttgaagacaaaacggtgacggtcagaaggacggcgggtgactgtctgtcggatctcggcgatgcgagcgccatcccggctatgacgaaatcgctcagtgactcaagcaagctcgtgcgctggcgcgcggccatgtttttatatgaagtcggcgatgaaagcgcactggaagcattaaaagcggcggaagacgatccggaattcgaagtcagcctgcaagtcaaaatggcgattgaacggattgagcacggagaagaggcgaaaggttcagtctggaaacagatgactgaaagcagaaaaaaagaacagttataacaaaaaggtgcgccatgcaccttttttatttgaattcactttttataaaaattatttagaatattgttgaaaaatgattcaaaactctatatagtaagtacaatattaattgttggagggtttttatcgaaatacagaaagaatagaaaagcgagacagggcaaagacgctgtaaacaggtaatttgcagaacgcgccctagaataaactgaaaattttaaaaatagtgcacagtctaaaaacagtagggggatcaccatggcagaattacgcagcaacatgatcacacagggaattgacagagcgccgcaccgcagccttcttcgcgctgccggcgtaaaagaagaagacttcggcaagccgtttatcgcggtctgtaattcatacatcgatatcgttcccgggcatgttcacctgcaggaatttggaaaaatcgtaaaagaagcaatcagggaagcgggcggtgtgccttttgaatttaacacgatcggagtagatgacggaatcgcgatggggcatatcggcatgagatattcactgccgagccgtgaaatcattgccgattcagttgaaacggtcgtctcggcgcactggtttgacggaatggtctgcattccgaactgcgacaaaattacgccgggaatgctgatggcggctatgcggattaatattccgaccatttttgtcagcggggggccgatggcagccggccgcacaagcgacggccgcaaaatttcgctttcttcagtatttgaaggcgtcggcgcatatcaagccgggaaaatcggtgaaagcgacctgcaggagctggaacagttcggctgcccgacgtgcggatcttgttcaggcatgtttacggcaaactccatgaactgtctgtctgaagcgctcggtctggcgcttccgggaaacggaacaattctggcaacttcaccggagagaagagagtttgtgagaaaatcagcggcccaattgatggagaccatcaaaaaagacattaagccgcgcgatattgtcaccgaaaaagcgattgacaacgcctttgcgttagacatggctctcggcggctcaaccaacacagtgctacatacgcttgcgcttgccaatgaagctggggttgagtactctttagaacgcattaacgaagtggctgaacgggtgcctcacttatcgaaattggcgccggcctcggacgtcttcattgaagatctgcacgaagcgggaggagtctcggcggcccttaatgaattggcgaaaaaagaaggggcgcttcatcttgacgcgctgactgtaacaggccgcacactcggagaaacaattgcgggtcatgaagtaaaggattatgacgtgattcatccgcttgacaatccgtttaccgaaaaaggcggtttggccgtcctgtttgggaatctggctccggacggcgccattatcaaaacaggcggcgtacaggacgggattacaagacatgaaggccccgctgtcgtctttgattcccaggatgccgcgcttgaaggcattataaaccgcaaagtaaaagaaggagatgttgtcattatccgttatgaagggccaaagggcggaccgggcatgccggagatgcttgctccgacgtctcagattgtcggaatggggcttggcccgaaagtggcgcttattacagacggccgtttttcaggagcgtcccggggtctttcaatcgggcacgtatcacctgaagcggctgaaggcggcccgctcgcattcgtagaaaacggcgaccatgtcatcgttgacatagaaaaacggattttggacgtacaagtgcctgaagaagaatgggaaaaacgcaaggccgaatggaaaggcttcgagccgaaagtaaaaacaggatatctggcccggtattccaaactcgtaacaagcgccaatacaggcggaatcatgaaaatataaaacagaggcctgaacaattgaattccggccccctctatagtatccttgacttcatataaggatttttagagggggcttttttatgtcaatggcttatgaagaatatatgcgccagctggtcgtgccgatgcgccgtgagctgacgggtgcgggttttcaggaattaacgactgctgaagaagtagaaagctttatggaacaggcagagggcacgacattggtcgttgtcaactccgtgtgcggctgtgcagccggtctcgcccgtccggctgcgactcaggctgttttacagcatgaaaaagcgcctgatcatacggttaccgtatttgccggtcaagataaagacgcaactgcaaaaatgcgtgaatattttacggggcaggaaccttcctcgccatcaatggcgctgttaaaagggaaagaggtcgttcattttattccccgccacgaaatcgaagggcatgacatggaggaaattatgaaaaatctgacggatgccttcgatgcgcactgctgaaatgcccgaattccgggcattttctttttggagaaaaagatgatcacaacgagttacagaccaagcgaatacacgatacacacagcgcagtcactcagtgtcaggctgggtgacacttactgcagccgcaataaacagcccattgaaaaaatgctggaacgagccgctagcgatcttttagtcatcggaaaggaacggttcgaactttacacgaagcaaggggagaagttcttttttcacccgaatacagcgatgttccgcgcaaagcggtttttgagaggggaagccgagccgttgttaaaagcagccggattacgcgagggggattcctttttagattgtacgctcggcctggcatccgatgcgattttggcaagcctggcagtcggaaaaagcggacaagtcatcggcctggagaaaaacaagcttgtctcattgcttgtagaaacaggacttcaaacgtgggaaaccggaatggagcagctccaaaccgccatgaaacgcattcaggttaaacatgccgactgcgccgattatttgcgggagcttcctgattcatcggtagatgtcatttattttgacccgatgtttcacgaacctgttgaaacgtcagacggcattgcaccgctccgcgcgctggcagaagagggttttaacgaagagtgcatcacgcaagccgtccgggcggcgaaaaaatgcgtagtgcttaaagaccattggaaaagcccgcggtttgaacgatacggcttcaaggtgctgaaaagaaagacggcgcttttccacttcggtgtcatccatgtaagctcatgatatcatgggcttctttttcgttaatcagtgatttccataacgacaaaataaagcagcgtgagaagtgatacagtcgcaaataaagcgttaatcatctcatcccctcctttttctccttcttattgtaagcggtttatccactcggtcacagttaccaatttcccatattgcatgataatacggtgccggacatgacgccgcgctttaatctatgctaaaataaaggaaaagaggacaataaaacagaggggaacaatctatcatgaaattgtggatgaaaaagacccttgtggttctgtttaccattgtaacgttcggactcgtgtctcctccggctgctttgatgacagacaagccttcaggacagtcgagcagtcttgagcagaatgattacaccgctttttatgatgaacacgccctgacgggagaagcgaaggcagggcgggagcctgaattactgtttcaatcgtatcagcagcagcttctcggtgatgctgaaaatcaatcatttttaaaattcggcagcaaaatctctccggtcattgaagatgattacagaagtgaaattctgccgaaaatcgaagatgtcatcacaggacatttagccaagtttcaagatgatgaagcgtatcaggatgtggttatttccagtaaaccgtcggccggaaaaactgaaaaaatttttcatgtgtataacaggctgacaggtgaagatcttttaaggttccacgtccgccgggatcatcctccgcaagacggctactggtttaattttcattaccataccgctgaagacggatttcaatcacatcatgagctcggcagcatttactgggaccgcaatacgccgcctgactggatgagcgtgtaatagcgagaagaaataaaaaaatcatttctgagaaattttgcagaaatgattttttattgtgttacactactaaaagactactttaaaaggatgaaaaaaatgaaacaatataaagatttgtgccgtcatgtgttagaaaacggagaaaaaaaaggagaccgtacgggaacgggtacgatcagcacgttcggctaccaaatgcggtttaaccttcaggaaggtttcccgatgcttacgacgaaaaagctccattttaagtccatcgcgcatgagctgctttggtttttaaaaggagatacgaacgtccgctaccttcaggaaaacggagtccgcatctggaacgaatgggcggatgaaaacggagaactcggaccggtttacggctctcaatggcgttcgtggcgcggagcggacggcgagaccattgatcaaatctcccggctgattcatgacatcaagacaaacccgaattccagacgtttaatcgtcagcgcctggaatgtcggcgaaattgatcatatggcgcttccgccctgccactgcctgtttcagttttatgtcgcggacggaaaactgtcgtgtcagctttatcagcgctcagcggatgtctttctcggcgtgccgtttaatattgcgtcttatgcgcttttaacaatgatgatcgcgcatgtgacgggacttgaaccgggtgagtttgttcatacattcggagacgtccacatttaccaaaaccatgtggagcaggtgaatttgcagctgacaagggatgtccgtccgctgccgaaactgcggtttgcgcgaaatgttgattctatttttgattttacgtttgaagactttatcattgaggattatgacccgcatccgcacataaaaggagctgtcagcgtatgatttcgtttatttttgcgatggatgagaaccggctgatcggaaaagataacgatctgccttggcaccttcccgatgatctcgcatatttcaaaaaagtgacgacgggtcacaccattgtaatggggcgcaaaacgtttgaatcaatcggacgcccgcttccgaaccggcggaacatcgttgtaacctcacgggacgaatcttcattcccgggctgtattaccgccgactcggctgaggaagtgctcaagctgatcccggcggatgaagaatgctttgtaatcggcggtgcccagctgtacagtgcgctctttccctatgcggacagactttacatgacaaaaattcaccatgtctttgaaggagaccgtttttttccggaatttaatgaagctgaatgggaattgacctcccgcaaacagggagtaaaagatgaaaaaaacccttacgattatgagtaccttgtatacgagaaaaagaattaagcagggggacaagaattgattcgttacggctgccttgtgatgtacgttgtatttatgttcatgaaaaatattcaggaatatatcaatcaaaaagagcttgacccgcggctctcttttcaaaaacagatgaggctggtgtatgagcggccgaaagcctttatgagaggctgcattgacgtgtcgggatcggcaatcggcattcatcatgatcagccgataccggacggccccgtattgtatgtgcatcccagattgcgcccggctgatcttctgctgcttgcgggacatcttgaagagccggctggttttatcgctggcgagaaagctttccggatgccgtttctcggaaattggctgcgtctgatgggtgtcatttgtggcggagacagccgggatgcagtgcttcaggaggcggaagtccggctgcaaaaagggcaaagtctgattctgtccgaagacggcaaaatcaatccggaggaactggcccttcgtttcgatctcccgattgtgcccgtcagcacttcgggaacagaccggctgctgcggggcaggttattgaaacggctgaaaccggctgatattgaattacatataaagcccgcttattatccggccggtcagaaacggctccgtgcataaaaaaagcacagtctctatacgagaggctgtgcttttttatttcagataaagggaactttgacgcaataaaacaaaatacagaaaaacatcgaggcgctgccgcctaaaacaaaactgtgccaaatggcgtgatgatacggaacttttctccaaatataaaatattgtgccggcggaatacaataagccgccgaaaagaagaaggccgaaaccgggacctgacagcgaagcgtacagcggtttaatggcgatgatgatcagccagcccatcattaaatagacaagcgttgaaaaaatgataaaccgcttcacaaaaaagattttaaacacgatgcctccgatggcaagcgaccaaacaataattaaaagggtcagaccgagcgtccctttaaggggtcctaataaaaatggcgtatatgttccggctattaatacgtatatcgcggaatgatccacaatttcaagaatgtctttcgtttttttatgctggatgctgtgcaaaagagtcgagctgagatacagcaggagcattgaagcgccgaatatggaaaagctgacgatgtctgtcggcgagccgtatttcaccgcaaagataatgagaaaaataagcgccggaatcgacagcaatacaccgattccgtgtgtgacggcatttgcgatttcttcttttattgtgaacaatcaaatgtcctcctttttaaaggatttgtttttgcagtgactgcaaaaaggtcaacccttctaatgtgatttttgttcctgcgcgtcctcggccttttgtcacatagttcatcttttctaagtaatcaagcctgtttctgacttgctggggcgttaatgtcattgtgctgttttcgcttaattcggatatgctccgtctgctggcgggttcgccttttgtatttaagtctttaattgcttccaaaataaacaaaaactcttctttctccatcaatgtcagccgtttttcttttttcttagcggttttcgctttctggctgtttttgatatacggcgggacatgctcgggataaatcgtgctgccggatgctgccgcggccatatagtgcgccgcattttcaagttctctgatgttgccgttaaaggtgtgccgctcaaacagcggataaacggacggatcgatatgaacatgctgccccgaggctgtcagcatatgctgcagaagaagcggtatatcgctttttcgttcagataaagcagggagcggaaggcctaacacgtgaagcctgtaaaataaatctatgctgaacgtgttttccgcgccggtatcgccaagattcgccgtgctgcttgcaatgatgcgggcggaaagcccggcgtccagctcggaaagaaggcgggcctgtaccgagagcggcatgtctccgatttcatataagaataatgttccgcggcgggccctgtttaatgcgccttcagccccgaacagttcatattcgagccgctcttcgctttgactgcagtgaacggtaataaatagttcgctgtttctgcgggatttatgatggatcgctctggccatttgtttttttccggttccgacttcacccgttatgaagaccggcaaatcagataaggcaaattgcgaggccaatcgtttcgcttctgaaaaggtgtgatgttcgccggctagctgataaaaaggatcagtttgttcaattacactcataaattggctccttttggttctaattggtttaagtataacacgtttatgcgatcgaaaatatctttttctcttgtatcggttcatttatttttatttacaaaattaaaataattatcttattgtttgaatattcatgttataatggcatattaaatagggatttaaataagaaaggactctgtaaatgaaaccgttgcttaaagaagactctctcatccaggtaaaagacattttaaaagcgcaccaaaacgtaaaggacgttgtgatacatacgcctttgcagaggaatgacagactttctgagaggtatggctgcaatatctatttgaaaagagaagacctgcaggtagtcagatcatttaagctcagaggggcttataataaaatgaggcagctctcaaaagagcagactgaaaacggaattgtatgcgcaagtgcgggaaaccatgcgcagggggttgcgttttcatgcaaacacctcggcattcacggcaagatttttatgccgtcaaccacaccgagacaaaaagtatcccaagtggaactgttcggaaaagaatttgttgaaatcatattgacgggtgacactttcgatgatgcgtataagagttctgcggaatgctgtgaaaaagaaaaccgcacgtttattcatccgtttgacgatcccgatgtcatggccggacagggaacggctgccatcgaaattttaaatgacattgacgtcgaaccgcattttctttttgcaagcgtagggggaggaggactcctgtccgggatcggcacgtacatgaaaaacatctcgccggatacaaaaatcatagcggtagagccgaagggcgcagcctcctattttgaatcgaaaaaagccggacaagtggttgaacttgagaaaattgataaatttgtcgatggggcggccgtaaaaaaaatcggcgctgaaacctttcaaacgctcgaaaccgtcgtcgatgacgttttgcttgtcccggaaggaaaagtgtgcagcacgattcttgaattatataatcaatgcgccatcgtggctgaaccggcgggtgcattgtccgtgtcagcacttgatctgtacaaagaagagattaaagggaaaaacgtcatctgcatggtcagcggagggaataatgacatcggcagaatgcaggagatgaaggagcgctccatgatttacgaggggctgcagcattattttatcgttaatttcccgcaaagggcgggagcgcttcgcgaataccttgatgaggtgctcggtcctgatgatgacatcacccggtttgaatacacgaaaaaaaataacaaaagcagcggccccgcattggtcggcattgagcttaagcatcgggaagattacggcgcgctcattgcccggatgaatcaaaaaggatttcattacgtagaggtgaataaagatcaggatctgttccacctgttaatctgactttttttagaacggccgcgcaaaatgacagacacgctttctcagattgtatataataaaaagaaaacaatcgaaaaagaaggattgatatcttgttactcaaaagcctagagttcaaacgacaggacgggattcaggtaaaagtgacagaaataccggttatcacggaaggtgaacaatatttttttcaaattcatcagcaccttgagctttatttgagagaagtttttgcttcacaaagtgtgagaacagtgtattcattccgacaatatgtcaagcgccgtatgaagtggaaagattatgaggccgttttcagccaagagattttaaaacataacgcataacggtgcacattccttagcgccttccttttgataagggagggtgcgggaatttttttatgatgaacgctgtaagcgttttatctatggggggaatggaaatgaaaaaaatgaaaagcttcgctgccgtcttttgtttgctgctcttgtgcgcctgcggggggaaaacgataaaagacccgctgaactatcagattgagccgttttcatatcagaaccaagacgggaaaacagtgtcactgaaaagcctgaaggggcatgtctggattgccgattttatgtttacaaactgtaatacagtctgtccgccgatgacggcccacatgaccgaactgcaaaaaaaactgaaggctgagaacctggacgtgcggattgtgtcattcagtgtagatcctgaaaatgatacgccgaaacagctgaaagcctttgcttccaaatatccgctttcgcttcgcaactgggattttctgaccggttacagccaaaaggacattgaagattttgcgctgaacagctttaaagcaatcgtcaaaaagccggagggagaggatcaggtcatacatcaaacttctttttatttagtcggacctgacggcaaggtgcttaaagattatgacggcgtgcagaaggttccgtatgatgatatcctctcagatgtcaaagcggctgaggagctcaagtaaactggcagattagacattttcaaaactgaaaaaacatgttacactttccactagtagacggggaaggagcaaccagattgaagctgcgaatgttctcattgatcgccggactggctttgcttttatcagcttgttctgtccagcgcaccggttctgacgctgaagaaccgaaaacgaaagatcatattgtcatagctgcggtcggtgattcattgactgaaggagtaggagatcctgacggttcaggatacgtcggcaagacagcggagtctcttaagaaaaagggacatgtgaaaacggtagatattaaaaattatgcggtgcagggcgacaaaacgtcagacctgctgaaaaagcttgataataaaaaagtgcagaaatcattaaggagcgccgactatatcttttttaccatcggcggcaatgacttaatgaaggtgctccgccagaatatgatgcagctgacggttcagccgttccaaaaggaagagaaaccttttgaaaaacggttcaagacgatcatttcaaaaatccgcaaatataatgaaaacgcagagctggtgtatgtcagcatgtataatccattcacgtttacgctgcctgaattaaaagaaattaatggggttgtgacggattggaacaagatcgccgcaaaagagctggaaaaagatcctcacgccgctgcggtgaatgttgaagacttgttcagtcaaaaaagcggcagcagacggatttcaaaggatgatgattttcatccgaacgcaaaagggtatgcactcatcgccgaccgattatacggcatcatagaaaaacaagggttaccagcagaatagggtgaaatgatgaaaaaatggaaatcgctgttttttgttcttctcgcactcaatgtgattgccgccgcggtaattgtgacattattggttatgccgggagaacaggcgaaaatacaagatcagacaaaaagtgagtacggctttcatatcacaagctccaaagaatcacttgccaggtttgtgaattcgtacttaaaagagaaggcatcgaatcagcttgactacaaagtggacatcaataacgatgtgcacgtggcaggtaaaatcaaagcattctcaacctccattaacgcggtcgtcacatttgaaccgtccgtacaggagaacggagatgtggttttgaaagtgacgaagttttcattaggtgaattaagcctgccaatcagctttgtgctgaattatatggacagcttttatgaactcccgtcatttgtgcacgttcattccggggataaaagcatcgagatccgtctgtcagaaatgcctttagacaacggcatgtatgtaaaagcggataaaatcaatctcgacacggatgaaattgaattttcctattatcatccgaaacaataagttttcataaaaaaaacacagatcctttcagggatttgtgtttttttgtgtcagcgttttttgtctagcttgctgaacagtttgattaacgttgcaagctcttcatcagagtagcagtcaaaccgtttaaaaaagtattctgtttttttctggttgaaatgatcgacaattttctccccggcttccgtaatatggattctgataattcgcctgtcctctttagaacggatgcgggtgatccattccttttctactaaagcatcggtcactgcggtaatgtggcttgcggagacctcaagaatgggggcaaattccgttacttttttaggcccttgttcactgagaatccgcaaaatggtgaattcgttcctggacagctctttatctagaatttcattaacttcatttctgatttgtttaaacacttttcgaagcaaagcttccatatcatacatcatttgtgtccttactttcaaatcatgaacctccaatatgtagtcagcgtggcattcgttcagcttctcctgagagcagaattatttttattctgtttatacatgctataatataataataccacgtatgaacaaaggagggcacccgtatgtcagaaaaaaaagaaatcgccacatttgcaggcggctgtttttggtgcatggtgaagccgtttgacgaacagcccgggattgaaaaggtggtgtccggctatacaggaggtcatactgagaatccgacttacgaagaagtgtgcagtgaaacgaccggacacagagaagccgttcaaatcacatttcaacctgacatttatccgtatgaaaagcttgtcgagctgttttggcagcagatcgacccgactgatgcaggcggccagtttgcagaccgcggaagttcatatcgggcggcgatatattaccataatgatgaacaaaaacaaatcgctgaagcctcaaaaaaacagcttgcagaaagcggcatatttaaaaagccgatcgtcacagacattttaaaggctgagcctttttatgaagcggaaggctatcatcagcacttttataagaaaaatcctgatcactacgggcgctaccgtgtaggttccggacgtcaaggctttctggatgagcattggagggacagataagatggcttttaataaagaagaaaaaatcaaatcattaaaccgcatgcaatatgaagtcacgcaaaacaacggaacggagccgccgtttcaaaatgaattctgggatcacaaagaagaggggctgtatgttgatatcgtatcaggaaagcccttgtttacatctctggataaattcgattctcattgcggctggcccagttttacaaaaccgattgaggaagaagaggttgacgaaaaactggacacaagccacgggatgatccggacggaagtgagaagcaaaacagcggactcccacttaggccacgtatttaatgacggcccggggccaagcggtctccgttattgcattaactctgcggcactccggtttattccgaaagacaagctgaaggaagagggctatgaagcctgcctgcatttatttgaaaaatagagctcagcaatgaggcctgcctatcagacaggccttttttctatgtttttttttcttcatgtaatcgttcaataatctttacgattgtttcttttgtgatgagcggcgcctgatccgattgatatctggggagattgaccttccgaaattccggatgtttggcgggatccggcaatatcgcgtaaagattgccccattcatataaagattccgtctcatgaggagaggtcagttcttcatgaagcttctcaccggggcgttttcccacttcaacagcggctggctgcggcagtccgtgccggaacgcatattcttcaaacccgtgaagcagttcttcaagcctcagggactccattttaaaaataaacgtttctccgccctttgtaatcgccgcagattgcagggtgagcgttgcggcgtcatcgatcgacataaaaaacctcgtcatgtttttatccgtaatggtgagcggaccgcctgccatcaactgctcaaataaaataggaataacggaaccgcgtgaaccgagcacattgccgaagcggaccgaacaaaacaccgtaccgcggttttgaacatgatgattcgcctgatgaaacagcttctcggacaacagcttcgtagctcccattgtgtttaccggggaaacggctttatcggttttttaagacatttactgcattttgaggaactatcagtggcggtgagatcgaaagcgtaaaattaaacttcaggataggggtgatttcaaactgagccggaattggcccttttcttttttgtgtcatcgtaacgataacttctttgaagaccattcttaatagcgagttctttttttctgtgcttgtttcaatgtgatattgatcaattatcttatttatgttgtttctgactgtattactgtctatttctgattgcgcttcttgagttccattgagttcatgcttggcaatctggagttctttaaattcttcatctaaaacagcttttcttttcaaaaaaagttcatcagtgtaaatgccgctttcatatttctcgaagataaaattctctttgttttttaactcttgttctttttgtgaaagatgttcagacatttgcttctttgttttcacattactatttacgtcttcgtatttagaaatcatataaatgatatgttttgttaaagtcttattatctaagttgcttaaagaagagaggtaatccagaatggcattttcaacatcgttatatctcacataagtgcatttattctttttgcaagtgagtgatttaacgtgatacacactttccgtgccgtttttgttttctcgcgttcgcctagtttcgtatttagataatggttcaccgcacttagaacaagtgcatacgcctgccaattcacttaattccaatgcgtttttattaggcagcaggggaactttgtttgcaattttctcttgtgattgttgaaattgttcttgatctattatagggacgtgtgcatccgatactataatttgttccttttcaggtctaattgttcgtttaccgtcttttgttttttccctaaccttatatttaacagttccgatatacgcttcgttttgcagaattgctttaattgtgtattgattccagcgcttttttcctgatggagtcggtatttgtaattttgttaagtgagaagcaatcgctgtataactaacttcttttccattcaacccatttaaaaagatgttaaagatgaattgaacgacttttgctttttcttcgactgggactagtttggatgtttttttgtttaaccggtatccataaggcgctagtcctgaaatccatttcccttgtgccgcatatgtgtatttagcgcctgtcatacgctctctggtcatttcaaattcttctctggccataaacaattcaaaacgaatctgacgcatgtctgcaggatttcgagggtcataaactttatatggtgtaatgataatcaatcgcttactttgaagaaggttaacaatttgtcccgcatcactgtagctcccgcggctgagtcttgttatttctttaacagcaattgcctggtacttgccttcctcgaggtctttaagacattctttaaaaacagggcgaccctcaatgctttctccagatccgatttccatttttaattcataggggatttcaatcgacttcagtattttattcatgagttcattttgttctgttagcgtatcttcgcctgttcttttttcccgctccatatcctgacgagagcgtctgagataacccaaaatatttgtaatgttgtaagaatgaacgatgttttttaactccaaaaaaacagcacctcctctttattgtatttactgtaaaaacagaagtattcgtacaatattctgtctgacattgaatacgagaataacctaaattctgaagatgaaacttttctcgtccagttgtcaggtgcattttgtaattatgaaaatgataaagcgaaagaaatgaataaacaactattcattaaccgatacggtgaagagcttggaattagctccattaaaggagataatcgatcagaatatgaagaaattattcgtacttatgaaaagaataattacaagcagaaagaaattaatatagatgagctgctgcaggcattatttgagacagagatgatgttatctttaaaagaaaagttttgataaaatcctaattgatgtatcataggggtttaatcagccactataggccacagagtccctcacacgctctgtggttttttgtttagattgaatgtaccaaataaaaaagaagcctcagaggacttcaaactggctctacggataggatagtaattaaaacagcaaataacacttacattttgttcaccacaagtgctgcttcaattatgaataaaattgttactgattaacaaattcgtatcctcagtaattattctgaggagtatgggggtgtttttattgactaactttgtccataagactatcaatggtttgaaaagtcttttagatgaaaaaggggctattaaattgttttgttctgagggatatattgtagagagccttgtgactttttctccaaacaaagcgtctcttagtgaaatccaaaactttcagtcgaatcataaattcactcttcctgatgattacctgaagtttatttctcagcataatggtgcgaaaattttcgaaattctttcagagggcgagaatattggaggaggtcttcatctatttagccttgaagaaatagaagaagaactaaaatacgagcttttgtttgaaggtatcaatggaatacctgtggctacctgttggaagaatgtcatttaatgatcgacaaggatagagtgaatcaaggtgatcctaattatctatttatatttgaaagtggttcagaatataatccattaaatttaaactttgaaatatttttagaccgatatattatgtcgaacggggatgctttttgggactggaaatactatacagctgaaaattattacaggacgagataaaactgtgtatgacagtcggaacggactgtctttttctgttaatcaaataataaagctatggtaaaatttagacagaaagaagcagaaaggagacgtaaatgaaagtatttgaagcatcctcgttaatttcagtagcggagaaacgggcaaaagaatacgatcagattagagaacaatttatcaatctcagaaaagcgtttcagggaatggctgatttagatgacaatgagttttcgggcaaaggtgctgataacatcaaggcattctttcaagatcacgcaggtgttacagacagctggcttgatctgatcgatatgaagattgcttttcttaacagtatttctggaaaagtatctgatgccggattgaccgattcgtttgtggaagagtcatttttagaacatgaactgattaatgcgaagaataaatcaaaagctatcatgcaggagcagcggaatgaaatgagggatattcttaatgagataagcgatattgttcatcttgatgttttctcgacagaggatgtcgatcaaaagctggattcagcagataagaaacgggacaataccgtacacaagctcggaaagctcgatcatgatctaacgaaggaatacgcagaaaccgaagcgaacgagaatttcatccaagcagactttcaacagctccaaaatgccacgggtaaagggaaaaacgcaacaccacttcactataacgtcaaggcgtacagagaaagtgtcatacataagaaaaaaggcgagattgcaagacattcagatgcttatttgacgattaaaaaagaagaagcgaaagagcgagaaatcaaggatctgaagaaaaagctctctgatggagtaactgatcctgatgaatacttggagattgccaagaagatcggttacgagaaccttgaaccttcccaacaacaatatgtgatgcagcttgaacaagcaaaacagatggaagaagccggagaagtgacctgggatattttaaaaggagccggcgtcggcctttatgatgtcgggaaagacacggtaaccggtttgtggcagctgatcagcaagcctgatgaagttgttgaaggtatcataggggcagttgcccatccaattaacacgtataatgccatttcaacagctattgaggaatcgtatcaaaaagatatggtgaacggggatgcttactccagatcaagatgggtgacatatgcggtcggttcagtggctgtggctgtcgtcggaacaaaaggcgcaggagccgttaacaaagctgatgcggcggggaaggtcataaacaaggcaggacaggcaggtcagaaaattaaggacattaagatttcagatttgcttccttataacactaagtatgatcttgctctggctgataacgtaccatacaatgtggttaacagccaaaaccttaaaaatggacttttgtccagtgcaaagaaattggatgaaagcagaaagccatttactggtcagaaagtaaatgtcccttggttaaataaagagaagtatgaggcctatgaaatagacggcaaggtaaaagttaaaggagagcctagagatgtaagccgtagagtatacacaatgaaagatattgaccttaatcaaaaaaatcgtaaaggctttacgaatcttcaactgatgaaaaatggtaatgctccgtttgctaaagatggcacgcaaataaatttacatcacttaattcaagaagagcctggtactatgctggagatacctgaaagctggcataataagtacagtgatgttttgcatggattaaaagggaatggacagagttttagaaatgatcctgtgcttgataaacaatataaaagtttcagaagaaggtattggagatggagagctcagcaatttgagaatcaagaataagaggtgaaagtttaatggattattcgaaaataaaaactttctttgatgaaaataaagaaaattcaattctcacggggggagtcactgaagatcagattagagaaatagaagaggagctcaatgtaactcttccagacagctataaatggtttttaactgagtatggttcagggggagcatacggaacaatgattctcggatatgactctcacggcgctgaagttgtcgagcagaccaatgaatataaaaaatattataacctttccgatggtcttgtagtgatcgaatatgtagatgaattttcttattgtcttgacactaacaagatgatagatggagaatgcccagtcattctttgggataaccaagagggatatggtaaacaagttgctaggacattccaagagtttttaatagaagagcttgaagaatcgaaagacgactggatcgatgatgaggactgggacgattaaaactaaaaagaaggtctatatctgtttttccatagcatatgaaggagtattaaaatgagcttcactaagatcaaacaaaagttgaaagagtttacgattaatgctggcacagatcctagcattaatacaaacgagcagctcaaagaaattgaaagaaatataggtaatcaattgccttccgactataaggattttttgaagggatatggaggctgttatttagaaagtaaaaaaacaacagatgaggttgagtatgacgtttgctacaaacctatagagaaagatccttggatgggtcaggaagatgatacacaattaatagagagcttctatggtttagctaacgatcataacagtctccaagaagcaatcaatacttattctgatcgctttcccaggaacattattcctatagcaagctcggcaggtgggaatgaaatatgcatggatatcgataatgaaaagatattgttttgggatcatgaattaagtcaccccgataaagactttttccttattgccaactcttttgaagagtttattctaagtttagtagatgaaccaattgaaactgataataatgacagtgatgtggaaattgaggttttagacaatgactttgcaaaattgctctttggtaaggacaattagcttttattgttaggaaaagtattgcaaagttaagctctcagaaagagagcttttttattttcgatagaaactaattataaaaagggagagaggttatggattcgtaccaagtaaagaaattaaaacccgaagaataccataagtgtaataatatttgggacatggaaaagaaaaagaaaatggctaaggtgttttatgacgaattagtaagcggaaacagaattacttttatttactcagtgaatgacgagtttataggagaaggatcgttagtttttcaaaacaatgacccagattataccattccggataaacgcatttatctgtctcgtatgattgttaaagaaggatattgaaattgcgggataggcggtattattgttgattatttgattgattatgctaaacaacttggatttgaggaaataacattcggtgtagatacagataacttaaacgcaagacatctatatgaaaagaagggctttacaaccgtattatttcttggtgaagatgaatatgtaaaactccttaaagtattaaaataaaattcccgagaattatggtgaatgtgtgggaggttactttcacaaacgatgatagacggtaacttaagctaatctaattcgttattaagatacggattagcatttatcctctcaaaaccaacccgtaatgaactaggatactgttggctgaggaattatttttccatgtattgtattttatggtattcttgaaatgaaaggaggagacaatgaaaaagaaattaattggggtcttgatcattgtttgtttttctgtgttcatgtatggcgcagttacacattcttttaaaaatcaaaaatccactgaggaagtattagaaagtgcatgggatgaatttggcttatttagccttggaattggagaaacagacccagtcatatcaattggtatggataaaacaaaaaatgaagaagaattacgacgctatctaaacgataacttatctaaggaagttaaagaagaatataaagttgagatcattaaaaaggatattaaggttttagaaagacaacatgagaagtatttggaaagtaataaagcgcattgatacattaaagatgcttatcggctccaaatacaataatgattttatccaataaacaaaagttttgcaaaccattccaatggtttcatttaatctgttataatcaatctgtaaaatacagactggttatagtgtatttctttaacaagaaatgcataaaataaaaagagcatggtgttggtcgcaacccatcaaagggcttgctcagatgttatgttattcatgatagacctaacccttcaggttatcaggctcaagggaggtctattttttatttatatacgtcaacagggcgattataaacgacccaaatgcaagcattcacattaatgcctgaaatgttgacataagcatcaccccctttctatagggggtgagcaagactccaagactccaagattcccttaagtgagcatacttaatgtacaggaatcatttatatgtcgttaaaaacccattcagttacctatgcgaaaagaaccatgttagaatcaggttcttttttgaatttgagttaaataatcggctggaattaccgataaataacatgtgaaataataccaaggaggttaagggattgaaaaaagtacttagtttagtaacaattacacttcttgctgttacaacgatgttttccattagcacatcgaaagcaaaagcaattgaagcaacaccgctttacagtcttcagattctttccgtcacatcggatggaaacgactttgtatgggagcctgttacaagcagcaagccaaatgcaacaaatgttttgaaaggtgacaagctgcatattaaagttcgctttatgggctatacaaattcgaccgtcattaaagcaaaggatgggagaaatttgttatacaaaggtgaagcgaacatatacaaatatgaccctatacttggacaaaacaaagttgtgataggatgggacaaatacattgaaattccaatgaacgaacttccttcaaatgagattcaagttgaaggtcttgggaaaaacatgaaaatcatttatagcaacgttgtaaaattcgagagaggatgaatgttatggaaggtctaaataactcttacaatatcacgaaagatccgaaatttttagcgttttgcagtttagcgacagaaggtgcaggaattagttcgaatacgcaatgttcaattggttttaatgaattcaaagaagcgctggagaatggcaaagtagttgataataaaaaccttaaaagcagttcagagttaaatcaccagtttgattactggaagtccagaataactgggggacgagctgtaactgaaactgataatcaagtgttagatatcatcaaacaagcatacaatcttggaatggttacgaaagataatatgcttttgagaaatcaagccattaacgcgtataaaacatctatttaatttaaaattaaagccccttattcaggaaggggcttttgctttgcaacttattctttatgtttaatctaaaaccataaagtcctgcacttttgtttcttcttcaggcaaatcaaattcattaagtttctttttagtacggatatcaaaaatccccatatagccaccaatcccttttttgttttcctcttgtgaaattacataaagtttttgatctttaaactttgcattcatatacggaaattttaaatcgaatttttcaaaagaaaaatctttatcgtactcaagtaagcaggcgtatacggatttattaatatatgtaacgtaaaatttaccgctttttttgtcgtaatacacagcgtccgcttgttcgagatcatcaggatattttatgaattttgatttccatgatcctttttcgattacagttagttcatgttctgagctagctacaacatatttttcagagtgatcaaatacatctccataggaagctaatccaatcgttttaataatcccttctgtgtttctatcaatgacgtacatagacattccttgaatgacgtaaatatacctattatcgcttcctcccatggttacgagggtaggcaaagtcaggctatattttttattgaactttttatcatttactttcagttcatttccattggtgtcgacattataggcttttacagaaatatcttctccttgataccaaaaagcaaatggattggataatttatgttctttaatagtgttgttttttaatgtgtaataatatggttcatgttcagctaacaagacgatatcgtctgaagagggggtttttttctggatatatggtatatccggtaccttaaagtatcgtttattgaatttttctccttgtgatgtggatatgagtacgcttttcttgatgagtggatttgaatagataaaaaagattttatcctcggttggatttattttagaagtacttacagagtgttcacctttatttataaagaatgcattgatcaacaatataactattgcaccaattagaactcctgaaatcccatataaaacataagactttttcatataacgctccatatcttttatataaaaaaacacacttgcagaataaatctgcaaagtaaatgattaggagcagacagtttttgatgagcggtcaatatccagatgtgacaagtgcttctccattactgtttaggtctgttccttttgtgtttttgtatgattgccacacaagtttagaggagcaatactatttatttgtgctttttttggttgcagctatgaataaggcttacctgttttactatgaaggacagcattgcatagagctttacaggtgaacacagatcataaaaaaacaccccctatgcgggagtgccaaaacatttatgcggtttgccctctacgttccactgagaagtcattatggtgatcaagcgcgatatggatactggctgtgtggcctcttcgggcttctttaaaaactttgtggccgtcaagaagataatgtccaacaagcccaagtaagataactaaaaagataaaagccgatgcaaatttaaatttcataaagacaatcccctctctgaatttgttttcgggcataaagcactttctcataaaaggctgtagctactttatggtcttcatttacattataatacattgctgcatcagtcgctaggtcttccacatccgaaagcatagcttttgattctaagtaatctaagattttaaaaagtcgttctttgtcattctcaacgaataaacccataagaaaatcaaacatttttcctaatacgtcatcgttcaactcctttgaaagcataagaccttgttcacaaacctgttttccatcgaccgtgttgaataatttaaagtgcgtttttgccaacattagaagtatgtcaagcagtcggctagaattgtgaagagaattactttgataaattgagacgccttctttaaaatactccaatgccttctccatatgtcctgttgtaaatgagcataaaccgagattgtacaaagaagaacctattaaccgcggcatatcaatttcttgtgcttgttttaatgcattcatgaaatgcggtattgctttttctggatactccatgtctaaataattcagaccgatgacgaatgaacattggattactcttattgagtatgtctcgtgtgctttgtaggtttctattgcttgaacaatatgatgcatagacatgtgggtttgcttcatgtgatagtacacttcagcaactttgtagtgaaattcagctcgctctatttcatcggggacaatagatatcttcttttcagctcggttgtaaaaacttattgctttaagatattcgtactgttcaaattcatacatcccatgaaaaaagttaaaataatattcaagaattccttttagatcgctttgtttactttcgatctcttctgataagtctgaaattttaggtcgttcttcattcatggtttttggttcaagataatcaagcattaattgatgtcgaaaacacatgagcgaatagtacaacaataaatcttgatcttcttccatatgctctatttcttgttcaacttcaccctttagaatttctgcatctgcaacactgaataatcttatgtatttgtaccatttattgatttttaagccaacctttgaagaagagatcaattgctccaaaaaaatcaccctcctagtatttcgactgattatgtaatattttatcataatgtaatatattaggaagagtgttttttcttaatttctcaatttggtgtggaatgcgatagaagccccctcgttcgagaaggggatatgatcaatttcctgttgctttcagtgaggcaagccactcatctaatgttccggagaagccttgttgaacggctaattcatatgctgattttccatctttaccggcagcgctagtagcttcagtactgcctttttcaccttttttttaatgaagctaaccattcaaaagtgatgaatattcaaggcgggagtaaggaaaattaacaaaaaatgtgagggaatttagatgaaacgatttattttggttatacctttattggctgctgttattgtctctccaactcaaatgaaagcaagtccaatgccttgtagtgcagtactcgaaccggtgaatcaaaaattgaaaaatgcgaagggtgcggcactaatctataaagtgcagttatacccgccaagtgctgcgagaacgaatatgagtattcttgctgtccaccttcctcagccatcttcttatggaagctacgacggttatgaaggatttgcctccaaaacaggggagatcagttggcgatttaaactatatccgactcccgagggagagagtcctaattgggctggaaggattgattccatatcagctgaagtgacaaatgttcaagtgcaagtacgcctttcaaattctaagacgcaaaagttggggccgagtgtattaacaaataatattcaatcttgctattagaaatgtagagctcttatcaaagaaagaaatgcgactggatcttttgaaaaaattctggtgaaaaatgaagaagagtccattaaggcggagtccaatgaatgatgaggaattaagaatcattctgaaatcaattcatcattgacagaacagagccggcaaaagtcgatattgcgtttgattttgtacaagaaagacggcataaaaagaaatggttagctaaaaaaaggcaaagagtcaacgctctttaccatcaggtgttttccttaagcggtctgcaatatgcttaattaaactcagcgcagcagtcactaatccaataactaaagcaatctcaagtaagaggataattccaaaatttaaaccgagactttcaaagtaatcaccagtaaaagagagcaattgataaatcccaagcatcagcacaataaaggaagcgcctataatcgccagagactttttagagaactccttagtatggttaaaattataaaccaataagaacaaaaatagacaagccatggcgatcttatgagtcaatgaatcacttgctgaaaacccttgcacaagtaaggagataattaatccggtcattccgattattttgttcaatatatcacctgctttgtataagtatgacttagatgtcagcttaccaattaaaggtgaaattctcaacataatgcagtttaaagttaacttaaaatgtgattattttaagaaagaggttgaaatatactcgattgtcaaaaaggggagcaagtaaggtctttgagaatggagaaatgggaattatattgtggacgacaaatcgaggttctgtaggtgttgaatgggactctggtgaatatggtgaatacaatgataaagtcgatgagctatttgttagcagattaatatgttttccgaaagttagacgaaagcagttcattaaaggaagggttagacaatgattaaaataacgctattccaagatgaatattgcaatggtgaatgggttgaaattgataggctattaaatatatttataagaacagagtcaattaatattgaagttattgatatcaaatacaattcactaaatactgtgcgaactcaaatacactctgcgtatatatagagaaaggacttaagatcactaggaccgaagatgaaatcgtgattttaaacgtagtaagaggaagaaatgaaaacctatgtagcaaccaaggaaactgagtactttaccaatgaatccattgaagaggtgctttatgctggtacaataaagaagctgcgtttagcaaaattgatggcacttcaggcaatagactaattttagatgtttgttttgatggcttgaggattaaatcttttatcaaaattcataatggtgttggcgagtagcttttgataaattggccagcgcaaagaaagaggttgaagactacaatgccaaactaattgaggcaggcacaatctctttgaaatgttggagagagctggacaagtctagataaaagatagtttttattcaaatactcaaggcagagcctatcgcacctacaatgccaacaaaatcaactagtgttgttacgttgctcataaagtcaaaagaattgtttattagaaacataaaatcagcccctgtgaaaaaatttaacactaagataaaaaataataagaagaaggattttatcactggcttgttttttgtgtaggagcagccttgaatattcgattgtattactaatatatcaaaatttctacaattaatccaattctctcttacgatagtttttaacgaatacaaaaaagccccacgaatggagctgctagattacgtattattgaacatagccagaaaagtcgctcggagcagagaaagatagatagtaaagcgcattggcatctagattttttattgttcctgtagctgtaccgttagcatttacagttagtgtttcagtagcaaaaatccagtcggaatcattccaaactttcacagttagtttagttccaatattatttgtaattgaatagcttatcgaagatttgccttgaaaataactgtttgaatataacgtattgccagttgcttgtccagcgaatgtcaatttgtttttcgtaagatttacaacgctatttgaattaggagggttaagaccaaaagctttaaattcactttcgacagagttagtaagcttagttgaaaacctagaattgtcggtctcagcagatgcggcagtggcaatgctcagagaaagaatggccaccatggtgcaaacaataaaactaaacaactttttcaaattaaacactcctttatttgtaagttaaagtaaataataacatttaatttcaggaggtcaatgggtttattcaaactggaatgaatctgtcacaaaatatgaagagcattttggtgaattacagctaaacgatttggataacttattgtattatgtactgaattttcagtctgttttgctaagcattaaggagttatgtaatagagagattatactctccaagattcaaaggaaggtatgcggagtttaccatgtagtcttaaatctataatcactttcagccagctataagaatgtttattaatcccatatggagagttagctttattaatacgacgattccttcaagatgcttttcattggcagattaaagtaagctaatccgtttccctgcagaccttcaataacaaatacattgttatggtcaaggttaatgtctaaaagcatgcttttccgttcagtgagcgggttattagcaattgaatgccaattaatataaattatatcgactacacagtaaacgatattataggcagattttttagacataaagcgtcccattacagtctcaaagtcaggaagcaaaaacaacagtaccattgagcatatcaagattcgagatttctcaacttgcttgttactttattgttgtaaacgagtataaagctggaaggttcagtgtagctttaggagccgaattgcttagagaaagcactgtatgaagagggattttaattaaataaagcagacattaagcctgctttatctttttgaacattattccttttttatatgaattaatgttctcaccaaatgcccgtccttaagattttaaattctgggcacggtcagactttttagggaaaatacattctaacaaaagaaaaaataaagttaatcctaatgataatttaaaattgtcgctgttcccaatggaacataagatacccactatataaataaataaaaacctaaacaacgaggcaaatataaacttgaagaagttatccccaatgagatgccttccaacagccacaaaaatattatcaaaagtaaaagaataaacaaccatacacacacttgttataacaatctgtttaaattctatttctaattcaaagaattttacaagcacatttgctgatcctgttgcaaataagattatcaccattatgattgcagtaggaatgagtgataaaaccaaagctcctattactgtagataataaaaatttttcatttgtgtttttttctgcagcttctttcttttctcctctgtacataaaaataaaaaagacgatgagagataaaagataaattgataacgtcataacaagcagattcatggtaatctctccttacctaattaaaacaaaagagtgaaggttgtaagcctcactctcttgtttttaatgtatagttataccaaaaagaacacaacaaccttcgcaattaactgtgcatcagctaatggaattccggctttcactaaggccacagtaacagctgtttctccgaaatttgtaagttcatctataacgtccgccgctttgtgtccccacttagaacaagcatcaccagctttttgtgcccatttatatgggatctttttaataaggtttcctaaagcggggccaccaaccctaagtgcttttactaatatttgtttagcgaaaggaatgccctgtgtatgtacttcaggatttgaagctaaaggagcctgtacgctattttgaactacaggtgcttttttactttctgctgcacttgcatagccaggagaaacaactgatatagccagcacagccaacgtgaacaccatgataaatgaaataagttttttcttcatttcttcaccatccttaaataaccattagtttaatatatttacaaatataatggatatttgtaatgaaatcaatatattacctaaaaaattttagttataaaagaaggaacaagaattttaaaaacatacttttgttattatacgagacacaattttcttaaaaaagaaccgaaagtctcattggggatgcccattttatgccgtggagaagattcaataaaactgtaggtttaacaaaaacaaatattttcaggagtgtaatatcataaaacactcagagggggaattaggtttaagaaacaccattggcaagattgaaattgttggaattttactggagtggtttgctttatgattttggggcaggagttaaggcgaaaagagataactcagacttggaatgatactgaaagcaacgtctacgatcaactttgacaaatactcaactgctgctgtcgttcaaacattaggatttgcttttaatttgcctacagggggctggtcatctgatttagctggattagctaataatgatcattctaggtgaatataaaattgtttacttttaggataagcaggaatgtaagatggcagggacggctcttatgacaaaacaccttgtaacgatttatgaagataaggatcaaaagaaaaaatcgggagtgacagctttatcatcacagacaaaggcggcccaaaagttgctgcaatgtgataaaaaataaccctgtcttaggcgggggattattacatgctgtttattatgctgtaaacaaacgcaacaataaataatggataagagataatagcaattagttttgaagatttgctctttttttcaaatgtgtatattagtgcaaatcctaaaaagaatattgtgacaaaccaagaagaataggacgggtacaatgcaataagtaagacaataagagtggataacgcaaaagaagagtcaagtgttattttctgatcgtttttcaaataaaccgcctccttacacatattccacattagatcgcttaaagaaggtgttgtggttgatcagccaattaaatatttcatgatgcaattgtgcggttctatgatggtaaagacctcgccgtgttccataagactacggggaagttgttaaaatccttaaaaatgagtcgttttagtctgtcatttcctaaaacagtgttttactcttgttacaaatatgcaagaagggcggtttgaacttgtatagattatgtacaatgctgttaattttgttaagtataacattagggtgtcaaaacccaaagcaaacattttatggaggctgagcaaaccatggtcggctatgtcattttaaaaggagagaatcaagcaattttcatacataatgaaaaagctaatgttaaagactatgaaaatcttagtgaaaaagagattattaaaaagtatagatcggatatagttttactgggacttagtcaacttaacaataaagatgacttgagcaaaggacaaaaaattcgtatttggtataaaagattcaatgaatcttcaccgccaaaaacaaatatctcaaagtttgaaagtatttagtatttattctttgattcccagaaaaccgctgcaaaactgaagcggcatattgaaccgaaataatgtcttcaaacctcacgtcattcttcattcgcggtggcttattcctgccccaggatttatttgacaattgttgactcaggtgcagagaaggcatatgtcaagaacacattttgaattactgggcaccttgaataaagccagcattcccatattcatatgcgaagagatcggtactgaacgctggatcatacatttgaacaagcttgcgaggctttgataaagaaagaacagtcaagagacgaaccattacatacatataatactcctgtgaaagcgggggtgtagttttggaaccttaccaacgttatgaggaattaaagaaaaaaacaataaaggttgtccataaagataattacagtatccgctatatagatcaggatgaagcgagtaatgacttagatgaattttataaacaatttgctcagcatttattggaggctgctttggaaaggagtgcagagtaagcttctttttttgatttgtttgtggtaagtatcttaataaacggctttatcagtactgatattaatcacatgcgtcacttcttgcagcaaagccgcttctgcgacattttgtccgccgataaggttggtttgaatggcttcaaagggattatcctcacatgtcggaacctgcttcagcgcagctgtgtgaaagacaatatcaacacctttcatcacttggttgactcttctgtagtcacgaacatcgccgagcacaaacgacagtctttgttcatccgcgtatttttgcttcatcacatattgtttactgtcatctttgctgaacacaatgacttctttaggggttaagagcaaaaggcgttttactatttggcttccgattgatcctgttccgcctgtgacgagaacagttttatcgtgaaaaaacggttgtagctctactgcttgctgtttaggcatggcttatcctccaactctcgtttctctaccatgcatcatatgttgaacaatttcagcgagttaatgaaagaaaccaataaatcaaaaattagagaaaaacattaatctgatgcgctttcatatcgcgttacccgattaatagaatagaaattacaaataaaacattgtactaaatattcattttaaatatttgctcacgtcaattttttctcttcataaatcctcacattcggacaatcttcacaaaaacttaacactgaacttcctgtatgtattttacaattaaagtgcacgttcataaaaggaggatggaaaatgaatcattcaaaaacacttttgttaaccgcggcagccggattgatgctcacatgcggtgcggtttcttcccaggccaaacataagctgtctgatccttatcattttaccgtgaatgcggcggcggaaacggagccggttgatacagccggtgatgcagctgatgatcctgcgatttggctggaccccaagaatcctcagaacagcaaattgatcacaaccaataaaaaatcaggcttagtcgtgtacagcctagagggaaagatgcttcattcctatcataccgggaagctgaacaatgttgatatccgttatgattttccgttgaacggaaaaaaagtcgatattgcggcggcatccaatcggtctgaaggaaagaataccattgagatttacgccattgacgggaaaaacggcacattacaaagcattacggatccaaaccgcccgattgcatcagcaattgatgaagtatacggtttcagcttgtaccacagtcaaaaaacaggaaaatattacgcgatggtgacagggaaagaaggcgaatttgaacaatacgaattaaatgcggataaaaatggatacatatccggcaaaaaggtaagggcgtttaaaatgaattctcagacagaagggatggcagcagacgatgaatacggcagtctttatatcgcagaagaagatgaggccatctggaagttcagcgctgagccggacggcggcagtaacggaacggttatcgatcgtgccgatggcaggcatttaacccctgatattgaaggactgacgatttactacgctgctgacgggaaaggttatctgcttgcctcaagccagggtaacagcagctacgcgatttatgaaagacagggacagaacaaatatgttgcggactttcagataacagacgggcctgaaacagacggcacaagcgatacagacggaattgacgttctgggtttcgggctggggcctgagtatccgttcggcctttttgtcgcacaggacggagagaatatagatcacggccaaaaggccaatcaaaattttaaaatggtgccatgggaaagaatcgctgataaaatcggctttcatccgcaggtcaataaacaggttgacccgagaaaactgactgacagaagcggaaaataaacatgaaaaaagcagcttatccaagctgctttttgatgtgaagagcgtttcatgagaaagtcttggaacggatagccgtaagcacagccggcagccggtcatacgtgtacgccggtactgtctcttgataattaagcgccgcgatttgtttacgttcacccgggtttgtcatataaaaatggatcttatccgcaaaatccgcaaacccgctgtaagaaacaaatgttgaaaacgggggcgcgggagaaaggtctgtcagctgaaaggcctgacaagccgcaatgtctaagcttctcgtatttaaactggtattttcgatgccgcgtccgttctgattgagcgcaaaccgataagaacggtgagggtttaagaccacctctgcgctgttgtaatataatgcggcaagttcgggttcaatccattcatccattacgagcacattttgctgtctggcgatttttttaggcagatgtctgcgccatcccttcccgataatacgaagcgtatacggaagcttcgccgctgctttcaccagttcaacgcggttcggatacgggtatccgatcagaagcagatttgtgtgaagagaggcttcagcaggttgttttttaaaaagccgctgattaacggggatcgggacataatatacgtgctgtaagcccatttgccggtaagcatcaagcgcgttttgttctatcgttaaaacggcatccgcaagcggcgcgattgtcatactcacatcgaaataaaaaggatcctccgtcatccatagatatacgggaatctgttctgtcttcagccattgaagccattcagacggaatacggtctcccgtcatcatcagactgatgtctggtttgaatgcccgtatactgcggatggtatcttcctcaaactcagaaacagaaaaaaagcggacggaagactgtaaaaagccttcctcgatccagcggtcaaaatacgtgtatatgcctttatatcctgaacggatatataaaacgttcatatgctgttacgaagtgaacgtgacactttcaactttgtcgacgtcaagcaatgttgtagcagagcctgccggtgtaacggaattttcctgcgtaacaaaaacgattccgtgaatttcgtcaaaggcaacaaattgaaccgggccgatcatgtctcctgaatccatcacaatgctgatgacagtgccgggctgaattcttgcaaaaatccatctcgccgctaatgaaataccgcttcccaatacagattgtgcgctgagactgtctttcgccgctgcttcatccacttttgcatcaattgccgattccaataaatcttttactttgttttccacattatctcctccatctgtgccgccagataaagcgctgttgtcaaatacaggggctaaaagagtttttaataacttctttttaagctccaaacgatcctcgctcatgcggacatacacctcctttacaatttcaacctcacgtttattcatattcctgattgaaaagattggtataagtcgaatgccgttttgcttgcatttttttcaataattaatcaaacagctgaattttcgaatcaggctttgtttgcctatgcggattgtaagagtatgacatacgttgtatagattaaaaaatgaaggagaggaatattttggattcaggagaaactgtaaaacacgggggttttgaggaggaatttcagctcgtactgcttcttcttcttttgttatctcatcagccgtccggagatcattcagatttgcggcgtcagcttgtaatggcaaaagagcttggggttcctgtgtcgcgcgtcaatctgattaacggcagcacactgcagaacgtaattgtcaaagaagtgctgtcagatttggccgtttttcaaaatccgctcaataatacgagatcaaacgtcgcgatttcaagcatcgtcagctggggggctttttaataacgatatcaggctctgtctctttcggagccgttttttacgttttacagaaggggtgatgggatggaaaagaagatctcaattatcttaacgagttacaacaaaccggatcttgtaaaacaggcgattgaaagtgttttgcatcagacctacagcaattgggagctgtttgtgatggatgatcattcaaatgaagaaacctcggccgccatcagtacgtatataaaagatcatcgcatatattatgacaacagttttatcaatccggccgaacggctgaagtcgacccggtatgccgttttgattaatgatgcgctttcacgggccgaaggcgaatacatcacttatttgacagacgacaccgtatttcatccgaataggctcagccgcatggcggaagcgcttaatcaatgcagcgagtttgatgccgtctattccagccagaaggtgatacatgtaaacgggcgcggaacagaacaattccacttctatcgttttgctgaagaggtgcttgatcaggccgcttttctcgttgatcactgttcagtgatgcaccggagatcattgcttgagcgtgtgaaagagaagttcggcagcttttgggacgaagatgttatgcattggaatcacggagactctgttttttggagcaggctcaacacatttacatcatttctgccgataaaagaagtgttggatacgacctataaaacaccccactcatttcagaacacgtatcaatcgcttccgtctgtcctgatcgacggatcctttgtaaaggggacggatcagaaagtatatcagcttgaccgaaataaaaggaagcctgtaaacgagcgctggcatacgttatacgaaggccggaccgtcgtcattccggatccgtttttatttcaatatgaggaagaggactccgccagtattccgaattttcagctcgtcagggatcagtttcatgtttattttatagaagacggggagaaaaggctggttgatcatagcgcatttcgcttttaccgatttaaacggcatggcatcccggctttagaacgggccgaaatacaatcgcttccggacggtccgccgatcagccggtggacatcggactgtgttcaacatttgcccgggaggatgctgtttcgcattgaacggaaattttatgtttatttgagaggggttctccatccgatcagtcatgacgtagcgaaacgattttttgcgaatcagaaggcgatacccatttcctttcagcaaattaaacaattaccaattggaatgccgttctatccggtgtacgatgaaattataagaaatctcaatataacaaaaggttgagagatgcagtcggatgtgcaaggaaaaggagagcttttatgaccgatcaatttgataaaaccgagaagcagtatatagagcttacttccggcattcagaggttcgagcatttcagtgtatatacggacccttttttgccgcagattttttcgcataactttgttcagctgcaccgtacatttccgttagacaaactgctgccgtttctttcgtccgttccgggcatgcttcaagccaattatattcatgtgaaagcgtctccggagcacgcatttccgcttcttctgaaacaaactttggtaaagcagggctgcgtagtggaagatgagctgttttttgcaaggaaactggaaaatggggacctgcaggccggacacccgctcactgcttgggggacggaaaagagcctcgccgatgggtcgtctattatgaacatctatgatgccctttacattggcgaggcggcggccgaacaaaagcttgagcggaaatatcctttgtataaggagggaacggttatgcttgtcgtgtgctacagcgacgcctcgcaaacgattccgatcggctgcggagagcttttcatcaacaaagcagataaaaccgcaaaaatagaagaagtcgcaattctggatcaattccaacgaaaaggctacggatcgatattgatgaatgagctgatggcggcggcaaagctgaacggcatggaaaccgtataccttgtgacgtccgggatggacggtgtaaaccgcttttatgaaaaactcggcttcaaaagatttcggcgcgtgcatacaatttttcattattttcttacatagttgggcattcgcataaaccaattgggagttggcccgcatacaatgccgtatatcgtaagaagaaaggatgatttgcgtatgtacggatacggatatggctacggttgcggcagttttggctatggttacgggcacggcggctgcggaggcggaaccagcacttttgtgctgatcgtggtattgtttattttattaatcatcgtcggtgcggcttttatttgttagactgaaaaaatcctataatgaaaatcagcctgcagagaacatcattttctgcaggctttttgttatttccatgctgaaaaatcagcttgaaaaacattttaatacatattacctttctggagaagggggagaaaatgtgaacatgacgattgaagaattaccagaatccagaattgcttatttccgaaacgtcggagagtatggcggaaagcaaaacaaagaactgatggagtcatttaaaaactgggcgcaattgaatggtctgcttgattattctgtcattttaggaattccgcaagatcatccgaatcgtactcctaaagagaaatgccgctatgatgtttgtcttgttatcaatcaagaccatgtgcctgaaccagcccggatcggtacattttccggagggaagtacgccgttttcttgcttgatcatacaaaagaggcagtcagcggattttggaacactgttttttctgagatcgaaaaaaataatttatcaatcagagaacagcctattatcgaaaggtatactttacaaaaggtgaatcatcatttgtgtgaaatattgattcccatacagtaaagaagacgggaattttccgccttctgcttatactgattcagatcaaaaatgatgggatgagcagataaatagcagaaccgaagaaagaataaaatcaacaataggaatagaatttccagaacgctcttcaggctgtcgggacatttccggcagcctgttttacagaaaggtattttctgcaaaaaactttctgaaggataagaatgcggttattcatctgttcatacaatgaagcaaatgggttttcgaggtggaaagatatggggagctatttaatcaaaccggagcttgacgcaaattatccgtcagtcagtcatggtaagggatcatatgtgtatgatcaggaggggaacaagtatcttgacggagcatcgggggcggtcacttgcaatatcggccacggcacggaggatattatacaagctttaaaagaacagcttgactccgtttcgtttgtgtatcgctcgcaattcaccagtactccggcggaagaactggctttatttctggccgatcatctgccgggcgggctgaattggtcattttttgtaaacagcggctcagaggcagtcgaaacagcgatgaaaatggccgttcaatattggcaggaaaaagggcaataccaaaaatccgtctttctatcaagatggggaagttaccacggcattactttgggagcgctttcattatcagggttctatgaacggagataccgcttcacccagctgcttgaacggtttccggccgtttcagcgcctaatatgtatcgttcagagctgcagggagaggaatttgtgaaagctgcggcggctgaactggaaacggctgttcagcggatcggttcctcatttatcgcgggatttgtcgcagagccgattgtcggagcagccggggcggccatcactccgccggcaggttattatgaagcgcttgaggttgtctgccgcaggcacggtattttgtttattgcggatgaagtcatgacggggctcgggagaacagggcggatgcttgcttctgagcattgggggattgcccctgatatcgcggtgctcggaaaagggttgggcgccggttacgctccgattgcggcagctgttgcgtctgatgacatcattgaaacgatcaagcggggctccggggtcattatgagcggacatacgtacagtgccaacccatactgtgcaagggcggcgcttgaagtgcttcgctatgtcaagaaacacgagctgcttcggcagtcagaggaaaaaggcgtaatgctgaagcggaaattagaagaaatcaaagaccgcagcggggtgatcggggatgtccgcggtaaaggcctcctgatcggggttgaattcgttaaggataaaacgacgaaggacgttttttcgaaaaaacaggccttcaccgaaaaaatcattaaagcggcaaaaaatcggggcctgcttatttacccagcaaagcccggtattgacagcggagaaggagacgccgtcatcatcgccccgccgttcacgatttcatatgcggagctggatgagctgtcagatctattttcccagtccgcagaagaagctgaaaaaatgatgaagaaggattgagctgatatgtctatttttcataaaaaaatcgatattcatgaagcaattgccgatgtcaaggacgaatctgtcatcatgttcggcggttttgggggagtgggttcacctccgtcattaatcgaagcgattttggaaagcggcgttaaagaattgaccgtcatctgcaatgatgccggatttccggaaataggtatcggtccgcttatcgttcataagcgggtaaaaaggctgatcgcttcccatatcggctcaaatcctgtcgcgggcagacaaatgactgacggagcgcttgaggtggaattttcgccgcaagggacgcttgctgaacggattcgcgcaggcggagcggggctaggcggtattttaactgatatcggcattgataacgcaaccgtttgtgaaaacaaagaaaccgtaacgattgacggaaagtcctatttagttgaaaaagcgctgacggctgatttcgcttttgtgtcggcacatattgctgatgaattcggaaatctgacgtttgacaaaacggcgcgcaacatgaaccctctgatggctgctgcggccgaaagaacatttgctgaggcggcagaaattgtgcctgccggcgaacttgacagcgagcatattgtaacgccgggcgttttcgtggagggtatcgtgcaaagtgaaggagtgaagtggagatgggcttgggaatagcggaaagagagagtatcgcgaggcgggccgccagtgaaattacctcaggtatgattgtcaacctggggatcggcattccttctttagtgccgaactttctgccggccggcatggaggtaatgctgcaggcggaaaacggcgtcctcgggatcggcggtagtccggagcgcggagaggaggatgagcttttatgcaatgcggccggatttcctgtcagtacagttaagggtgcttcctattttgattcagctctgtcttttgccatgatcagaaaagggctgatagatattaccattttaggcgcgctccaagtcagcaggacaggtgatctcgccaattggctcgtgccggggaaaaaggtgcccggaatgggcggggcgatggagcttgcccaaggcgcgaaaaaagtggttgtcgtcatgagccacaccgatcagaaaggccggccgaagctggtcgaaagctgttcattgccgcttacagcagcaggctgtgcagatctcatcattacagagaaagccgtcatcagcatagatgatggggcttttgttcttgaggaactgctgaatggcacgaccatagacgatgtcattcaaacaacggatgccgaaatcagattgggagaatgttttcttaaaagggggtctgtccatggatcaattagaaaagaaagtcactgagtgggcggaagaaaacacagcaaaagcggtaagcctgctgaaacggctgatcggggaaaaaagcacgttcggccatgaatttaacgcacaggcagtcgttttagaaaaactgagacagtttgacatggatattgatgtctgggagccgagtgtcaaacaattgaaagagcatccttattttgtatcggaacgcgaagacttccatgaaagcccgaatatcacagccgtaaagaaaggggccgggggcggaagatcactgatactgaacggacatattgatgttgtcccggaaggaaatcccgccgcatggacgtatgaaccgtttacagctgttgaaaaggacggcaaagtttacggacgcggttcaacggatatgaaaggcggcaatacagccctcttgtttgcgttagaagcgcttgaagcctgcgggattacgttaaaaggagatgttctgtttcaaagtgtcgtagatgaagagtgcggcggcgcgggaacactggcggctgttatgaagggctacaaggctgacggggcgcttattcccgaaccgactaatttaaagctgtttgttaagcagcaagggtccatgtggttccgcattacggtaagaggattgtccgcacacggcggcacccgctatgaaggggtgagcgccattgaaaaaagcctgcatgtcatcacagcccttaaagagcttgaacacgtccgtaacgcccgtatcaaagacccgctttatcgggacgttccgattccggttcccattaatatcggcaccgtccaagggggaacgtggccatcatcggtagctgaccgtgtggtgatagaaggcaggtgcggaatagcgccggatgaaacgcccgaagcagtaaaagaagagctggcaagctggctgaaagatttggagtaccgggatgaatggtttaaacaccaccccgcggaaatagaatggtttggggctcagtggcttccgaatgatctcccggatgagcatccgctgatttccgctctggaatcttcttttgagaaaatgaaaggggcaaaaccggttcgtgaagcgtccccgtggggaacggacggagggcttttgcagcacgcgggacagacgccggtcatcgtcttcggtccgggagaagtcaaggcggcgcatcaggcgaatgaatacattgaagtccgggcgttaatcgatgccgtcaaaatcatttctctttttatcatggaatggtgcggggtggcagatgggggtgacagcgctgataaaggaactgagggctgaaagcggagcggccgagattgatgcagaccgtttcaacgagcggatcagggtcattcgttatgacggacagcccgaggcgcttataccggccgttttggcagaagcaaaggaagagggagcccaaaaggtgattttctttgccaagcgcggcgatgagccggaatttgtcaagcatctttttattattgagggtgccatagacgggtattacaacgggcataaggctgttgtgatggtgcgctatttatcagaggaacggagacggtcagattcatatgtatcagaagattcggctgttgaccgtttatatgagacaccgcggcggggaatgactcagacagaaagcacgctgatgttcagaaaagcggacgaagatgatgcggaccgtttaacgcacttatataaacatgtttttcttacctatccgactcctgtttttaatcccctttatattaaaaaaacaatgaaagaaaacaccatctattatgccgcattcgatcaggatcgtctcattggggcggcaagcgcagatatcaatccggttttggggcacgcagaaatgaccgattgcgcggttctgtcagattacagggggaactccgtaacggcacacttgtttaaagcgttggagcaggaactcgctggccggggaatcattcatcttttttccttggcccgtgcagcgtcttacgggatgaacgccgttttgtatcatgcgggatacggctacagaggcaggcttgtgaacaactgccgcatttcagaagggctcgaaaatatgaatatatggtgcaaaactttacgtttggccattcataaggaggaattcgtttgacaaacaaatggtttcagccgaagcgtcactggaaggagattgaattgtggaaagatgtgccggaagaaaagtggaatgattggctgtggcagctcacccatactgtaagaaccgtcgatgacctgaaaaaagtcattcatttgaccgaagaggaagaagaaggcgtcaggatgtctgtaaaaaccattcccctgaacattacgccttattatgcttctttaatggatcccgataacccgagatgtccgatccgcatgcagtccgtgccgctgtcagaagaaatgcacaaaacgaaatatgaccttgaagatccgctgtttgaagatgaagattcaccggttcccggtcttacgcaccgctatcctgaccgcgttctttttctggtgacaaatcaatgctcgatgtattgccgatactgcaccagaaggcgtttttccggacagatcggaatgggggtgccgaaaaaacagctcgatgcggcaatcgcttacatccgggaaacgccggaaatccgtgactgcctgatttccggcggagacgggcttttaattaacgatcagattctggaatatattttgaaaaacctgcgtgacattccccaccttgaaattatcaggatcggaacgagagcgcccgtcgtatttccgcagcggataacggataacctttgtcagattttgaaaaaatatcatccggtctggctgaacactcattttaatacgagcatcgaactgacggaagaatcggttgcggcgtgtgaaaagctcgttaacgcaggtgttccggtcggtaaccaggctgttattttagcaggcattaacgattcggtgccgattatgaaaaaactcatgcatgatttagtgaaaatccgcgtgcgtccgtactatatttatcaatgtgatttgtcagagggaatcggccatttcagagcgcctgtgtcaaaaggattggaaatcattgaaggactgagaggccacacaacaggctttgccgtgccgacctttgtcgtcgacgccccgggcggaggcggtaaaatcgccctgcagccgaactacttgctctcccaaagtccggagaaagttgtgatcagaaacttcgaaggggtgattacatcttatcccgagccggaaaactatatcccgaatcaagctgacgactattttgaatctgtttttccgggaacaatggccaaacgcgagcctgtcggactgagcgccattttcgcggacaaagaggtttcgttcacaccggaaaatgtatcgaggatcgacaggaggaaaacgtttacatcaaaccctgatcatgaaacgctgaaagaccgcagggaaaagagagatgaattgaaagaaaagaaatttattgcacagcaaaagaaagagcaaaaagcaggatcggaagtcggaggtgagtcgccgtgaagccatgcgagtggtgcggcaatcagaaggcgtcagcttgtcaggcggctgtgtactgggagcttcctgacggtacgagagccatagaaattacagaaacacccgcattcgcctgctcctcctgcggcatgacgtatcaggaggaagcggtcatagcggaaatcgaaaatcagctttttttagtcgatgcaaaaaaattaccggaaacactcacatatcaagagctgatggggacagaacggatcttgaaacggaattattttgacttctcctagtcttcttttgttgtaatttcacacttgaattgtataatagtacaacaaaagacagtcatcaggaggggaaacccatgaaatccttttatcactatttgatgaaatacaggcatcccaaaccgcaggacgcaatcagccggtttgcgaatcaggcatacgaagatcacggctttccgaaaacgtcaagcgattatcacgagctcagttcttatttagaactgagcgccgactatttagaaacgatggcgacatttgatgaagcttgggaaaaatatgagaccgaggtgcatcacgcctgacgaaaaaccgcacattgtgcggtttttttctgttgaaatcaatcgcttatgaggtgccgtatgatcaaatcccgcaatgcctttcgttttgatcagcgcgtaaacaagtcttcctgatggcacggatcataaggcagcagaatgtatagctgcagagttcaccggatcagacctgctgccggcggggtcccgtgtaaggagcctcttttcacggagaaataatcaaacatttaaatgaagtgagaggaatcaaatgatctatggtgaggcactgacgtttggacggaaaagggaattttatgtgacaaggttgaagcggattgaagttgtggcttcattgaaagccgaaacgagtttggttcttcatgataaacaagccattgcagatatgcagccggaattggatctccatacatcttcgatgatgtgtttcacggcaaattttgaacatcacggcggtgatattgtcaacatgccttcgggccgggtatttatctttgtgtcatggagaaataaacaaaaactcattcaaaaacaggcgctttttgtctcgtcattgttactgctcattcgatcgagagcgcaatgccatcagacgcttctgttacggtaagtgaaaaaacgcacaagcatgttggggtttttgccattttgaacaggtgcagaaatagatatttcctgtggttttcatgcccatgcgaaattatggcggccggcatacgatagcgtatgacagtccgcggcaagggggagacagcatgaagccagataaaccgaaatttcaagtgggagacatcgtggtcgtcgtgatgtacggaaccgtcggcaccattacgaaggttcatcaaattgataaacattatctttatgaagtcaatcataatgaagtgctttattttgaatcgtccatccagctttataaagattatgagggcgtgatcgtcgatatggaaaaattagatattgaatatgaatttctgatcggcgacgtcgtatatgtaaaggactacggaaaggaattattccgagttatcggtcacagaactgaaatatggagatatttagaggatggctgggaggatattatttatgagctgactcggctgaaagacggagagtggcttgaaacggaggaagaggatctcacgctggttctgagaaaatatgaaatggatcagtttgtgcatcagctgctgtttgtccactatgttggggaagcatctcatgagatcggcgaggataccgtcgcgtctgctcttcttcagtttgaaggcgatgctgatgatcccgatgccctgcatgtgctggcggtatcgattgtagatgagctgcttgatatttataacgattataagattctttatcatttgttcggtgacgaagaatataaagatatgatgaattttgtgctggaaagcctgcgggagcatttcagctagccggcaaaaaaacggacggtgacatataaaaaccagggcagacagccggcaaagatgacaaacgacattcctttcagcactttttccaatacgatatcaaatccatctccgtccaataaagccatcattttcgtcattatcttttctccctccggggcttgtttttttaaaagtatatgagcggacaaaacgtttagaactttcgggtataatttgaacggttttttcataaaacataaaaaaggaggcggtgtttgcatgaaagaaatagatcttgtgattgacacagaagaaatagctgattatttttacagtcagcttgctatgcgcgggtacataccgagtgaagaggaaatcttcgaaatagccgacatcacctttgattatttattagaaaaatgtatgatagacgaagagcttgatgaagactgaaactgcggaaccgaagtgaaaaagcttcggttttttcaatcagctcgggagaatgaaacatggggggaaaacgttgtacaagccagcaagtcttttcgcattgtttattctgctcgcagcagcgatccggatagaagccgtccgggcttttgatgagcgtgtgatagaagcggctgtcaggatcaggtctgtctggctgaatgaattgatgttatggataacggagctcggcacgaccgcggtgcttttgccgcttcttcttttgacaggcgcagctctgtatatgtacaaaaaaacgccggatgttgtttttttgccgcttctctttctcattgaacggattgtaaacataaaaataaaagaattgattgaaagagccagacccgcttttgaaccgctcgtccatgaaacctcatacagttttccgagcggccactccatgaattcggcagtgatgtatcccgtcatcgcttactttttgatcaagcatgttccgtttttcacgaaaagaaagagggccctcaccgtctttaccggagttctcgtcattctgatcggattcagcagaatttatttgggcgcgcattttccgacggatgtccttgccggattcagtctcggactttgcctcgtttcgctttttgcgctctttgacgaaaagtatcatccgtttcgacaaaaatagagacaggaaaaatgagaaaaaacgctaatactattaagaaataagagggagggatcttgatgctgttatcgctgcccgtgtttaaaaaaaagacttgtgcctatgatgtgacgatttttcaaacaccccgctacggcgagaaaaagggatacagggtcgtctatcggacagagctggccgctgacaatcatcaagacgcactggaaagggcattttctgtttttaatgtgcctgatacggtcccaaacgactatcaagccagattcatagcgaccggagacgtcatactcatagacgaaggaagaaaaggaaagacctattacaggcttaaccctgcgggatggagtaaaattaaccggctgctcgtccagccgaggtaagacggagccggctgaagattcagccggcttccgtattgtctgggaaagacagtgttaaggcttccgtttagcggcggaatgctcttttccatgcgcttcatcagctgcaatgacgtctgaaacgggcacgtgattgttctttttctggccggtcacccggttgcgctgttttttgcccattatgttcactcctttttctttaggcttgtcatcccgcatattctgcccaagattgccctgatcaatgctgatgattgtctcttaccgttattcagtgtacaatgggtgggagtttgaataggcaggaggaaaaggaaatgagtgtacatataaacgcagaaaaaggccaaattgcggatacagtgcttttgccgggagatccgctccgagcgaaatttattgcggaaacgtatcttgaaaatgtggaatgctataatgaagtcagaggaatgtacggatttacgggtacatataacggcaaaaaagtatcagttcaaggcaccggcatgggtgttccgtctatctctatttatgtgaatgaactgattcaaagctatgatgttcaaaacttaatcagagtcggctcatgcggagccatccgtaatgacgtgaaagtgcgtgacgtgattttggctatgacgtcttcaacggattcacagatgaaccgtgtcgccttcggcagtgtagattatgctccttgcgcagacttcgaactgcttcataaagcgtaccaggaagcgcaaaaaaacaatcttcccgtagcggtcggaagcgtattcaccgccgatcagttttacaatgaagactcccaaatcgaaaagcttgccagatacggcgtcctcggcgtagagatggaaacgactgctttatatacgcttgccgctaaatacggcaaaaaagcgctgtctatcctgactgtaagcgatcacgtattaacgggagaagaaacaacggcagaagagcgtcaaacgacttttcatgatatgattaaactggcgctgcatactgtatcgtaaacttgagatgagggttatgctgattaaagcagccctcttctttatgcatcgccctgattcaaaaaaagaaaggtaagggtaaaatgaagaaatccactaaatggttctcgctcgctgccgctctcagcgtaaccgcaatcgtgggcaccggctgcagcatttcagacggcgacagccataaggacacaaaaacagcagctgaaacaaaacaatcagatgacacatcaagcaaaaaaacaacgaagacagaaaacagtgattttgtattagagagcaaatattttaatgatattaaagaagtgaacgggcttgagaccattcaaaacccgacaaatacacttgcgctcgtaaataagacatatacgctgccgggagattataaaccgaatgatctcgtaatcccgaaagtcgaattttcttttactgagaaaatcgagaaacgatatatccgcaaacctgccgccgatgctttggcggaactattcagcgccgggaaaaaagaaggttatgacctggttgccgtttcaggataccgttcttatgacagacagaaagttattttcgataatgaagtcagtctgaaaggtgaaaaaaaggcgaaagaagccgtcgcatatccggggcaaagcgaacaccagacggggcttgccatggacatttccagcaaaagcaacggatatgagctgaatgaggcgttcggaaacacggcggacggcaaatgggtgaaagaccatgcgtatgaatacggctttatcatccgctatcctaaaggcaaagaaaatgttacaaagtatgagtatgaaccatggcatttacgctatgtaggcaaaaaagcggcaaaagccatccatgaccatcaattaacgcttgaagaatattttaatgaagtaaagaaagtgtaatgagaagaagcccgcttgaaaaatagaaagcgggctttctttattaccagaagagcagacctccaagcgcaaatccggtaatgaaaccaaggccgataccgtaggctgctccccagcctccccagcctcctccccaataaccgaatccgtaccctctgtgacggccgccgacaggggtgatatacactttgctgttagtcacccgtacgattcttccgacgtggactctgccgtttcgttctgtaattcttgctacttttccttggtgctgccggcaaagatgataatagttttgcatcttttctcctcctatccaacctatctttctatgtcagcttatgatagagtgcggtaaaaaggttggacgaaaacaggaggacaattgccgttttacttgtaagcgacaaaagcgcagtgtcccatatattcacggtacgtctgcataagctcgtaatgagccgtcagcgtatcgtagtgaaccggctgaataacgggcgataaatccatttctgtagtcggctcctgcgcattgttttcatagacagcgggaatgaaatccgctttctgaaagccttgctgaagcaatctctgtttccatgcggtttcatcctgcaatacggtaaaaccgtagaagtcttttatctgcgtgatggcgttttccggcatgggcttttgtaaagcagcttcaatgccgatcagcatgcccccgggtttaaggacccgcaggatttcagacagcgatgaatcaagatttgaaaaggtgagaactgattcggaaagaacggcggaaaattgattttcagcaaacggcagccgctcaagctccgctaaatagcccggaatggttaagccttcagcggcaaatcgttttgctgctttttcaagcataaggggatccttatccacacaggtgacgggatacagcaggtggccgagataagcggccgtctgtcccgttccgcagccggcgtcaagaatcggttcgccaggaggaggagccgcttttgtgagaacggctttggaaaaagcgagcccgccggggtgagcccctccgactccgaataaggacagcatttctaaatatttgctcaaaggccgaatcctccttttttcctcagcatatgttgagagaaaagcataggtttgggtaaacgggaaagaagggcgcctcacgtttgaagttgacgaatgagcgttcgtctatgataataatgtaagaataaaaaggtggtgttttcttgaagcggcaatttaaactgttttttattatattgatcactgcggtcgcagcctcagcgcttacgctgtttatcacgggcaatacgaccattttcggacaaggctcggctgctttgacgaacagcaaatttgagaaattcaataaagcctatgagcagattaaaagtgattactatcaaaaaacagatgacagcaaattagtagacggagcgataaaaggcatgatcagttccctggatgatccgtattcttcttatatggatcctcaggaaggaaagtcgtttgaagaaacaatttccgcttcgtttgaaggcatcggcgcacaagtggaagaaaaggacggcagcatcctgatcgtatcgccgattaaagggtcacccgcggaaaaagcgggggttaaaccgaatgaccagatcttgaaggtcaacggcaaaagcgttaaaggccttaatgtaaacgaagccgtcgcattaatccgcggcaaaaagggaacaaacgtcaagcttgtgctgcacagagcgggtgtcggcgatctgaacctgtcgatcaaacgtgacaccatcccggttgaaacggtgtactctgaaatgaaaaaaggagacatcggcgaaatccaaatcacatccttctccgaatcgacggcaaaagagctgaattcagccattgacagcctcgaaaaacaaggagcgaaaggatacattctcgatttaaggggcaacccgggcggcctgatggatgaagccatcaaaatgagcaacatgtttatcgataaagggaaaaatatcatgcaggtcgaatacaaagacggcacgaaagaagtcatgaaagcgacgaaagagcgcaaagtgacaaaaccgacagtcgtcctcgtcaatgacggcaccgcgagcgccgcggaaatcatgtcggctgcgctgcatgaatcatccggaattccgctgatcggcgagaaaacgttcggaaaaggaaccgtgcagacggcaaaagattacagcgacggttctaccgttaaactgacaatcgcaaaatggctgacagcggacggagagtggattcataaaaaaggcatcaaaccgcaatatcaggttaagcttcctgaatatgcgaacctgccgtatttagatgcgaaaaaaacatacaaatacggggattccggaacgaccgtcaccaatgcgcaaaaaatgctgaaagcgctggggtacagcgtgaatgtaaacggcacgtatgataaagcatttgaacaagcagtcaaacaattccaagcaaaagagaagctgaaacaaacaggtattttaacgggagacacaacggcaaaactgatgacggatctgcaaaaacagcttgcggacaacgatacacaaatgaaaaaagccgttgaaacattaaataagaatatgaaatagtaaaaaacacccgatgcgtcgctcgcgcatggggtgttttttgtttgcgaaaagcccgtcttatgtcgtttcctgttcaaaaaggtggctgttcgcctgaatgaaaaactgtgattgctcatagtgataggtgacttttgagaaatcaaacggctggccgttggttaaatgaaaaatcgtttcaacgcaaagcttaggcgctcctgtaaacagacctaagtactccgcttcttcctcatttaacatccccgcgtacagatataaatctgaaaaaccgcgctttaacccgagaccgtctctaatataatcaaatatggattctgccacgatctctttattcaaatacgtaataatggatttgttgtaaaatgactcttcgatacacaatgtcagcccgtcaatatatcggattcgcttgacataatacacgtcgccgtcaggcggcatattcagattttgagcagcctcaggcgtgggttttctcacttccagcgctaataatttggaagtgacattaaaatcttcaagtgattctttaaatccctgattagaaagcagactgatatacccttttcttttattccgtctgacaaaaatgccgcttcccctcacttgaaacacaatcccctttttttctaataaatctaaggacttggttatcgtgcttttgctcacgttaaaccgggtcattaaggtttgcagcacaggcagtttatccccttgctgcagctgatgttcttctatgtatttttcaatatctatcgcgatttgctggtattttaacatatccattcctcattcatttattgtcccgcttctttcagaattatagcataatcgtttttaaaagccatttcgtaaattaactataattgtttatgtattgataaattataccggtacaattataatgtaaacgtataatatgaaaatgaaggcaggaattcttctacacctgcgaagcggtgcttgaagctgctgcagtgcatttattcggtatgcaagcggcagtcaaataaaggaggatataaacgatggggacattgccaaaagattttttatggggaggcgctctggccgcccaccaatttgaagggggatggaataaaggcggcaaggggccgagtgtagtggacgtcatgacggcaggcgcgcatggtgtgccccggaaaataacagatacaattgaagagcgggaattttatccgaatcatgaagcgatcgatttttatcatcgttataaagaggacatcgcattattcagcgagctgggcctgaaatgtttaagaacgtccatcggctggagcagaatttttcctaaaggtgatgaagcggagcccaatgaggaagggttggctttttacgaccgggtgtttgatgaattgctgaaacatgggattgaaccggtaattaccttgtcacattttgagatgccgctgcatttggcgagggaatacggcggtttcagaaacagaaaaacagtcggattttttgtgaaattcgctgaagtgtgttttgaacgctataaacataaggtgaaatattggatgacgtttaatgaaatcaataataagatggatgtgaataatccgatctttttatggacgaactcgggcgtcgccgttaaagaaaacgaaaacgcaaaagaagtcatgtatcaggccggccatcacgaactgctggcaagcgcattggctgtttcgaagggaagagaaatcaatcctgagttcaggatcggcgcgatggtatcacatgtcccgatttacccgtactcatctcaccccgatgatgtgatgctggctgaagaaacgatgagacagcgctttttcttcccggacgtccaggttcgcggatattatccaagctatgcgttaaaagaatttgaaagagaaggctatcagatacactttgaagacggtgatgaagagattttgaaaaatggccgagtggactacctcggattcagctattacatgtccactaccgtaaaaagtgacgtgataaacgataataccggggatgtggtaaacggaggattgccaaacggcgtggaaaatccttatattacagcgagtgattggggctgggcgattgacccgaccggtttacggtacacattaaaccgcttatacgaccgctaccagattccattatttatcgtggaaaacggattcggcgccattgacacattagaagaggacggttcaattcatgacgcttcaagaattgaatatttatcgtcacatataaaagctttggaaaaagcagtcacatatgatggcgtggatgtaatgggctatacaccatggggaattattgatattgtgtcatttacaaccggagaaatgaaaaaacgctacggcatgatttatgttgatcgggataatgaaggcaacggttcaatgaagcggcttaagaaagactcatttgaatggtataaaaaagtgattgaaacaaacggcgcatatgtatcctaaaggtgtaaaaagggaaggcttcaccgttgtgtgaagccggctttttatcagtaattatgaaagcgcattcattaaaacgggaaggaggtgactgtccggcttttcatttagaatcgcttataaaaataaggaaagggatggtggttcatgttttttaaaaaaagtctgcacatgaccctggtttttcttatgtttttctttttcatatcaagcagcacggaagccgaagtgtatgcggctgatcggaaggcttcagacaaaaacaaagtaagggtgtggttcagttctgaaaaagatccggcttcccgtacgtggtatgacgggccgctggaagtgaaatacgccttagacgaacaaacaccgcttacatggacaaaaaagaaggcttctgactccgccgccgtgtatattgatccgtcgcgccgctatcaaagtgtgttgggcgtaggatcgtccctggaagaatccacaatccataatttatcaaaaatgacacccgcaaaaagaaaagaagtgctgaaaaaactggttgatcccaaagatggtatcggcatggacgttatgcgcataacgatcgggacatctgattttacggcacaggaattttatacgtatgacgatatgcctgaaggccaaacagatcctaagctccgtcatttctcgatccaaaaggatattgatttacacattacagcaaccatcaaggaagcgctggcgataaatccggaactgaaaatcattgcctcaccgtggagcccgccggcttggatgaaaacgaatgaaaacctcaagcggggaaagctgaaagataaatatatcggcgcactggccgtttacttccgcaaatttattgaggcgtacgaaaagcagggaattccgatttatgcgatgacccttcaaaatgaacctttgctggaaatcgactatccgagcatgtacatgccgccgtctcaggagcgcaaactggcgatagccgtgaaaaaagaattgaaaaaacacataattgacacgaaaatttggatttatgatcacaatgcgagcggggcgtggaactatattccgccgattttagatgataaaaaaggaaaccgggcggcagacggcatcgcttttcacgattatgacggtgacctttccgtcatgtcggaaatcggaaagagatatcctgatcaatctattcacttaacggagcggtctgtctgggggacggcaggggcggatcggatcgcacagtatttccgcaacggcgcgtcgagctacaatgcgtgggtgacgatgctcgacagtcaaattaagacgcatcattggataggcaccccggacccgacgctgtttattcaggatgctaaaaaccctgaccgctattggaatatcccgatctttcatatgacaggcaacttttcaaaatttatcgagcgcggagccaaacggatagaaagtaattacggctccaaaaacacagtctcgaatgtatcgttccttaatcctgatcaatccattgtgacagtcgtaatcaaccagacatcttcagaacaaaaattccatgtcgtttcagaaaatcggcagtttgaagccgtcatcccggctaaaaccgtcgccacctacaaatggcagcacaaaaagtaaaaaagccggcacatcgatgtgccggcttttttctgttaagcgcctttttggttcagtttatcagagggcgctttattgaataaaccgtctttgacggcgtttgaagacgctttttttacaaaaaacgggttaaggataataacggcagccatgttagcggtcaacccccaaaacccttcatatataccgtgggcggattgggtgatatttaccgtgaatgtcacgataagaccgacgagaagaccgataattgtcgcttctttcgtttgattcttccaaaacagactgacggcgatagccggaaagatctgaaccatgccggaaacaccgagaagctgaagggtaacgagcgcagtcgggaacagcataccgaataaaagcgcgagcccgatgacgacaaataccattgaacgggtgatcatcgtcagcttgcttggtgacacattcgggtgaatcaaatcccgatataagttattcgcaaataagtttgatgctccgatggccatgatagagcagggaatcaatgacgcaagggcgatcgtggagtaagcaaatccctgtgcgactccgccgtaagacgtttgaatcagcttcaataaagcgagccgcggattggtatcttccggaaggacaagaaacgcgataaagccgagaaaaataacaagaatcaaaacaatattataaagcggcagaaacatgctgtttttgcggacggcatctgcgctttttgccgtaaatacaccggttgccgcatgcgcccacataaagagcgccagcgcagatacgatggaagctgtgataaaccaaggaattcctttcggccccgagtccggtatcgtcagcatttgcggcgctttttcagccaaagtgtgaatcatcggcgtccagccgtgaaaatggatcagcgggagtgagacgaccataaacagcataatcacccacaccagaatgtctttaataatcgccgtaaacgtcggccctttaattccgctgaaaaaagtatacagcgctacaagaataaaagagatgatgacgaccatattgacattaatgacacccgttccggccacctgaagcgtatcttgaatcccgctcagctggagacaaatataaggaatgagcataagaacgccgacaatggcgacaagactggccaaaagtttactgtcaaaacgctcacgggcataatcggcaagcgtcgttaatttgtgaatttttgccactttccacaatttcggcagaaagaaataagcgataaaatacgccaaaacagaatacgggattgcaaaaaaagcaacgcttccccctgtgtaggctgtgcttgttaagcctaaaaacgtataagccgtatagagatccgcgccgactaaaaaccagacgaggagccccccgaaccgtctgccgccgacagaccattcctcaacagaagtacgtgatgatttgtctcttccggctataaagccgatacagacaacggttaaaacgatgacggctgtaatgatcaatgctgttatatttgcgggcatcagtccagtcctccttgtttcttctgcagcctataaataagaaacgaacataatggagtgactgcgatccataaaagcagccagaaatgaaaaaagggcagcccgataatgatcggatgaacccgattagcgactgacagcagggccagctggctgaaagggattaagatgagaacgaaaattagtgcttttctgaccatttactttcctcctgaaacttgataatgctccttatcatagcaggtgtcagataagatcacaagatatttttcagaaaaaaaagaattctattacttttttaactgaaacactttagttgcatcttcattcatattaaattagaatagttaatatctcgaaatcaagatatttaggagtgaatacattgaatacacaaggattgcaccatgttaccgcatttgcaaaagatcctgctgaaaatcttcggttttatactgaagtgctgggtttgcggctcgttaaaaaaaccgttaattttgacgacccggccacttatcacttttatttcggcaaccaaaacggagagccgggcacgatcattacattttttccttttcagggaagccgcccgggaaccgtgggaaaagggcaggccggaagaatttatttctccgtgccgaaaggagcactcgcgttttggaagcgccggcttgaagaaaacggcttgtctgtaaaagaacagatcatgctgtctgaacaagtccttctctttaatgatacagaagacctgccgcttgccataatggaagatgaaagaagcggacagagtgaatggactccttcgggcattactgaaaaagaagcgatcacaggcatgagaggtgttcttctgtactcgtaccgtcctgaagcaaccattcaatttctcatagaacgcttcggttattcaaagacaggagaagaaaatcaaattgtcaggctgcaatcggaggcaaggatcggacatattatagatgttgaccttgcgccgaaagaagcaggtgccggcggttacgggacagttcatcatgtcgctttccgcacgagcgaaaaagagcaggcggagtggaaggatattcttgctgattctcatcttgcttcatctgacattcttgacaggtcatactttacttcaatctatttcagagaaagcggcggcattttatttgaaatggcaactgacgaaccgggctttatgacggatgaatcctttgaaaatctcggaacagagctgaagcttccggaatggctggaagagcatcgcagtcagattacagctgttctgcccataatggagaaaggagaatgatgatgaaacatgtgtttgaacagggaacgtcagaaaatgttctgctgcttttgcacggaacgggaggaaatgaacatgatcttctgtcgctcggacgttttatcgatccgaacgcaagtctgctgggggtcagaggatcagtgtcggaaaacggcatgccccgtttttttaagcggctgaaagaaggggtatttgacgagaaagatttaattgaacggacggaagaattaaagaattttattgatgaagcggcgcaaatgtacgggttcagcagagaaaacgtgattgctgccggctattcaaacggcgccaatattgcagcaagtcttttgtttcattataaagatgtactgaaaggagcggttctgcatcatccgatggtgccgatacgcggagtgaagctgcctgatatggaagggctgcctgtgtttatcggtgcgggaaaacgcgatcccctatgtacaaaagaagaatcggaggagctttatcagtatctgacagatgctcatgcatccgttgctcttgaatggcaggagggcggtcatcagctcacacagcaggaagccgagcaggcacgagcctggtacagtgagcgattcctataaaaaacccttagtctgcttaagcggactaagggtttctttcatcttacagccaagttgacactttagatacaggcagccggttgcttttatgcgccggcttaacggctttaccgattgaaatcagcatgacgggcacgaaacgctcgctcacgtcgaattctttaacgaattgctctttattgaatccgccgatcgcgcaagtgtcgtagccttttgctttagcggcaagcatcagctgcatcgctgctaaagaagcgtttaaaaatgctgaatcgcgggcaaactgatcattttggtatgcaccgttaatctggcctaaaagcgtttgtttaatctcttctgtgatattgccttgctcagccagttcagcataaacgtcttcaccattttcatttgcttttaagtcgcctaatacggcaataactgctgatgaatcaataatctgtttttgattaaaagcaaccggaagcagggcagcttttgcttcatcactgtgaaaaacttgaaaatgccaatgctgaaggttccaggcggaaggcgcttgcgttgtgatttcaaggagttctgtcaattcctcttttgtaatgaccgcgtctttatcgtattctttaacagatgcgcgttcctttaaaacgtctaatacggatgtcatcatgtttcctccttcggataaacgtgttatcataatagaaaagttagaagcttactaaatgtaacttgaaaactaattttaatggatcacaaaaaacttgtcaattcatagatgaagggatgaattcacgtgggatatacaatgtgtcctaaaatggaatccgctttttctcttttgggaaaacgctggaacggcctcattatccatgtactgatggacgggccgaaacgatttaaagatatgaccgaaacgataccgacaatcagtcaaaaaatgctcgcggagcggctcaaagagctggaacaaaatgaaatcgtcgagcgtcaggtgctgccagaaacacctgtcaaagtcatttataaactgactgataaaggcatggcactgcaagccgtttttcaggaaatgcaaaaatgggcagacagtttttgcgagcccgggggatctgccaacgacacatgtgatgaataataaaggctgcccaaggcagccttttcttaatgataatgtttaatcgtcataaaaaccattaatatcaaaattgttcagattgaggttcaagccttttaattgatttaataaagcatcgaatgtaaggaaatgatcatttttacattccgccggaacatcatctggagaaaatagttccattcctccctcaatccactgtttccggtataactgaaatgccgcttcaattaaatgatcaggcgttacaataaaccctaagcttacgtcatggtcctcactgtagccgaattcaaacccgcagcaagggcagatatcaaatgttttttgatattcgccgttataaacgggacttgtctctaatcctttaaatccgcatatcaaacaaggatacaactcactaaccaacatccatccctcttttattcagtttgaaaacatccaaaacaagcagggaggccttttacagtttcccggttaaaaactgagcctcaccgagcccgaagctccaatcggcgttcccgttttctgtaacggaaatcatgacgtcctcgggtgatatgccgcattctgttttaagctgatcagccatcagttgatataacgtttctttctgatgttcggtgcgcgctttgctgacaatgctgatgatgacaagagctttgcttcttttgaaaccgagcccggtatcttcaatgataagctcatgaggccgatgctggtgaacgatctgataacggtccgttactgggacgtcaaaagctttaaccatggcgtaatgggcggtatccagtaacttttttaatgctgcgtcatcccggccttcaataacgtcaaaacgaagtaatggcatattttattccccctgatggttttataatatcgtaacttgtaaaaaaagtataacagttaatcaaaatataatcaaattataaccaaaatgtttacatattaatgcaatattaaagagaggcacatgttgttacaatcgcccaatcaatttcctcattttatgaatacgcttaagaataggcagacataaaggaggaaaaacatgtaccctcgtcatgcattgtatcgcgggaatttcggtcctgccggatttccggcgagaagtccttttttgttcggcgctcctttattcggcggatttttaggcggtcttctcggaggcgtgattgccacaggttttacaagaccccgctatccgtacgggtttgccggttacggatacggaggcgtcccatacggcggtttcgggccgggagccggcggttatccgccattttattaagaaaaaacggcctgcatcgcgcgggccgtttttttatcttaaaatctccacttccgatagattgtagtcttcctgttttgaaaacataacttcaatcatcccgtctttatagactgcttttgttcctttccgtttgacgaggctcggaagtacgatttctttttttccttctcccaggctgctgttctctacaacgaggctgtgtgacgtatgcttaatcctgatacggtcgagttcctcttgttcggcgggaattttcgcaaaaacatgatcggatgtttcaaacaggtcaatttccggcttgggcggttccgcttcgaccggatcggcctttttggacatcgggtcgcgaaaagggaactgtccggcataaccggcgccgaatacgctttccatcactcggttgacatatgtctcgacatctttcggatcagcatttttaaacgtttctttagagaactgattttggaagggaaaatatctgttccaatcaaacacggcatctcaccctttcttaacggacaacatagtatatgcccgccggaagcttcccgtgatataatataatctgtttacagaaaggaaggggaaggccgtgcaagggaataacgtaagaaaaggaatcatttataccgcttgttctttcgtcatgtgggggctgtttccggtctattggaaacttcttgaacaaatacccgcattggacattttagctcaccggattttatggtcatttgttttcatgtgtgtgcttttaactgtgcttaagaagtggaaaaccggatggcgtgaactgcgtcttttgaaatcggaagggggcctgctggcgctttttttcgcttccgttttaatttccgttaattggtttgtgtacatatgggccgtcaatcacggctttttgcttgaagcaagtctcgggtactacattaatccgctcgtttccgttcttttgggcatcctattcttaaaagaaaagcttaacaagatgcaaacagcagccgtttctattgccggggcggccgtgctcatatctgcgtttcaatatggcgcggttccttatatcgcattgctgcttgcattcagcttcggtctgtacggcttatgtaaaaaaagaacccgcatgtccagcacgatcggactgacgctggagacgcttttgattaccccggctgcacttatttatttaggatatacagctgacgggagcacttttgggtccttgggggcaggaacatgggcgctcctatttttcgcaggcgtatttacggccctgccgctgttattgtttgcagagggggcaaagcgtctgccgctgtatcaagtcggcattttgcaatatatagcgccgaccatcacccttatgcttggcgtatttgtgtatcatgaaccgttttccgggcaaaaagcgtttaccttcatttgtatatgggcagcattgcttttgtttaccttttcacagataaaatggaagcggccgataaaaagccgctaagcctttcgctttccagcgatagcttaaattatgtataatcattacgagtatgtaaaggagctgtacaatgggcactgataaagacatagcaaaagcctatcaggcactgtggaataaccgcactctcccggcttcaacccttgaagaagcggaaaaggcgattgatcttgaactgcttgatcaaagaacacatccgaggctccggaagtcacccgaggaaaagtttgctctggcggtgcagcgaattgtagattcccggctgcggccgattgagaaatatgaattggttgaactacatacgaagcgtttgcaatttttaaaagaagaaagaggggagcagctatgaaagcgatcataaaagaagatgtgcaaacttctttagagcgatatgccgatcgtcctgtatatatccatttggaaacaacgaccggttcttattcagcgcatctgaatgagaaaaatatgacggttgtagcctatatacgcaatgcaaaagtgacgtaccatcaggcgaaaatcaaaggaaacggcccgtaccgcgtcggtttgaaaacagaagagggctggatttacgcagaaggtttgactgagtatacagtagatgaagaagaccgtttgttaatggcggggcatctgccgggcggaaaattggcgatttcgcttcaaatcagcgaaaagccgtttacagtttaaagaaaagggtgaaaatcatgaaagaacatgtactcgtcatcctgcctcaccctgatgatgaatcatacggagtggcaggactgattgctttacacagacaaaaagatattcccgttacgtatgcatgcgcaacgcttggcgaaatgggccggaacatgggagatccctttttcgcgaaccgtgaaacactgccgctgttaagaaagcaagagctgattgacgcatgcaaagcaatggacattactgacctgagaatgctcgggcttcgtgataaaacacttgaatttgaagatgacgagtggctcgcggatatgatggaagagattatcgacgatgtaaaaccgagtctgattgtcacattctatccggagcacggcgtccatccggatcatgatgcatgcggcgaagcggtcatcagagcgctttacagaaagaaaaaagaggaccgcccgcgcacgctttgcatggcaatcacccgcaacagggaggaagccgtcggcaagcctgatgtcattcttgatattaaagaggttgccgatattaaaatgaatgccttaaaagcgcaccgcacccaaacggaaggcatgctgagagagctggaagaaaaattaaaaaataacgagccggttcttcagacatggtttgaagaagaagtgtattggacatatccgtggaaagactgataaaaaaagggataaggctgaaatgccttatccctttttttgtgtcagatcggaagcgatcgcttccgcaagcgaagaccgtattgataaatttgaaaaactcagtccgagctgcaccgcggtttgggcgatttcaggacggattccggataacgtcgctttcacgccgagcattccgagtgattcaattaaggtgaaaagctgttgggcaaccatcgtatcaatcatggctacgcctgataaatcaatgtacagctgcgtgatgcgcttctctgaacactggtgcagcgtattctccaaaatcattttggctcttgccgtgtcaatatccccgatcagcggcagcagtccgacattgtcaaaaagcacaattaccggcgagctcagctctgtaatcaattctttttgcgcttcaagctgaatgtttgtgtttttatacatttcctctatgaaaatatgaatgaccacatcaaacgatttaatcagcgtatggaatatatcttcggcatcttcttctgtcacggtgtctgaatgaagtctggtaaactgctttacatggccgacatacaaatcacgaactctgataaactcgcgaatgatgtaatggatgggagtttttaaatgttctttatcccgtgcggcttcaaacgcccacttttccaatgccgctgtatatacttccttctcttcagaaaaaatccgattgagttgataattaaacgccagattttgttttttcagatttgtgagaacagccgggtcagtagaagcataaacagaatcaggatccgtatcatgaagggtatcaaaccatgtctgactgatatcctccgcccgttcggttaaataatcgtacagcagtttatgtttcggcattgctgctcctcctttataaaatcatcatttttttcacataacgcttttgcagcttcatcagtctgaagaataaaccgacagctcctgcggcaagtcctgcaattaacccgatccagtagccgtatgccccgaggctcgtgtaagtgccgactgcgtaaccgagcggaagcccgataatccaatacgaaacaaaagccgcaccgagtgtatagttgacatccttatatcctctcagggcgccttgtatcggagctgctacggcatcagaaagctggaaaaacagcgcatagattaaaaagtgctgcgtcaacatgagcacctccggatctgatgtatacattccggcgatttgcggcctgaacagtaaaatgaaagccgccgtgcataaagaaaaacaaagggccatcacaatgccgatatagctgtatgaccgggcatccctgtaacgctttgcgcctgcttcaaagccgactaaaatcgtcatggccatggatacgctgagcggcagcatatacaagagggaagcaaaattcattgccgcctggtgggatgcaatcgtcaccgtccggaaatggctcattagaagtgtgacagccgcaaaaatgctcgtttcaaaaaataccgcaaaaccgataggcaaaccgattttcaaaagttttctgcattcagacggagaaaaacggtacagtttccgaaatacagagtacccggcaaacggctcaaatctgaagacgataaaaaagctgacggcgcaaatacaccagtaagtcagggcggaagcgagccccgcaccgactccgcccaatgccggcatgttgaatttcccgaaaataaatacataatttaaaacaaaattaataggcaatgagcaaagcgtaataagcatcgtgactcgcgttttgccgagtgcgtcaatgaacgagcgcaaaacggcgtacacaaacaaaggaaaaataccgagggataaaaagcctaaaaagtgtttggcgatcgtccggacacgaggttccaggcccaaatgtcccaagatcatatcaacggtgaaaaagccgaccaggataaccgccgcactgagaatggccgctacataaacggcctggatgacggaaaacggcacttccttttgtctgccggctccaaacagctgcgaaacaacgggcgtaacggccattaatattcctgcaaggcccgtatacaccggcgtccacaggcttgaaccgattgcaacaccggctaaatcggcggcgctcactttccctgacatcaccgtgtccaaaaaggtgatcagggcaaggcccgcctgtgtgattaaaatcggaatgaagatatgtaacagctgtctgaccttttggccgatcgtgttcgtttctctcaatttaggttccccgtttctttattttaacgagagaaattataacattttatgtataaaaagcaatgaaagccggcctactcttttttatccggtttcggctttttaaacatcttggcataaatgaatgaaagtgaaatgacccctaaaaaggtgcagatatattgcatcagccgtgcaaattccatatgatttcgcctcctttcatgattatggtgtacacagcggcgcatatccatgcgcgcgatgcagaaaataagggaaaggagatgatgtgacatgcgccacactcaaatgacggaaagcgcgtttaccgctgccgttcaaacgtacttgaaacaaattaccgaggatgccggaatgatactgcggacattggatgaaaaagaccaatgccttctttgcgaattagatgaactgggacatacgtttcaggaaatgcaggctgtcgcttcgtcgttttacctgcagtcatatatcgaacattttacgccttcctatacagagctggcgagggccgtgcagcatctggcggaagaaaagcacggagcgctgattgtgattgaacgtgcagatccgctggacggaatgatacaaaaagggaccagcctgcatgccgagatcagttcagctttaattgagagtattttttatcccggcaatccgcttcatgacggagccgtattggtcagagaaaaccgggttgtatcagcagccaatgtgcttccgctcacaacaaaacatgtcgatctcaaatacgggacgcgccacagggccgcgatgggactttcggccgtgactgatgcactcgtgctcgttgtttcagaagaaacgggaaaaatgtcttttgctaaagacggcggactgtatccgcttgtttcgccgcgggcgcttcatacgaaataataagaaaatgggaatattgtacccatttaatattaataaggtgaacatctttacctttttctgtattggtgttatcgtttaaatatacataaaatttaaaagaatagggagtggaaagatggcaaatgtattgatgatcggctttccgggagaaggccatatcaatccgtctttaggcgtcgtaaaagaactgaaggcaaaaggggaacatgtcgtatattacggcgtgaaggaatatgagcacaaaatcgcgtcaagcggagcggaattccgtgaatgtgaagatttccgaaaagatgaattcggaaaaaacgcaacgggtgatgaacagcgggatgctaccgagtttttactgttaatgattgagacttccgaaaaagccgcactccgtattcttgaggaagtaaaagatgaatcatacgactacatcctttatgatcatcattttctggcaggaaggcttgtgagaaataagctgaaactgccggcatattcactttgcacaacatttgcaatgaatgaagcatttattaaagaagtgttttcaaatacaaaccttatatcagaggaatcatctcattatccggcttataccgaagcggtcagccggcttaatgaagaattcagcgcagacattaaaacgccgtatgatattttctcaaatgacggcagaaaaaccatcgtatttacttcaagagcgtttcagccgaaagaagaagagtttggcgattcttatctctttgtcggtccgtccataactgaaaggccggcggctcaggatttcccgtttgaccagcttgaaggagaaaaagtcctgtttatttcaatgggcacgatttttaacaatcagaaggaattgtttaataaatgcttaaaagcggtcaggaactttaacggaaaagccgtcatgtcaatcggcaaacatcttgatccggcggagcttgatgaaattcctgagaatgttattgtaaagccttatgttccgcagcttgagatcctgaagagagcggacttatttatcactcacggcggaatgaacagtacgagcgaagggctttactacaaaaccccgatgatcgtcattccgatgggagcagatcagttcgccgtcggaagccaagtggaaaacacgggcgcgggcaagatgtttaaaaaagaagatgtaacagcggaactgctcactgaagcaataaaagaattgagcgaaaatcctgaatatcagacaaaagcttctgaaatcggagaatccctgaaagcggccggcggagcacagcgtgcagcggaattgatagcagaagacgtgaaaactgccgagacccgggttctgtaatcagccgtcacccgcttcctttataggaagcgggcttttttttgtttgtttttcgggaggattttcacgccgtgaagagaattgtatgaaaaacagacaagaaaggtggaatgtcgcggaaaaaagccatgttatgaaaatgattccaaagtcttttgtgaaatgttctcaatttatgtaaaatgtgtggcattggtgatgatctaagaccaaatgaatcggaattaatgtcgacttctgaatgaatcctgcataacaggcggcgtccaaagaaaaggaacgtccctttcagcaatgataaataggaggtttttcgttatatgaagaaaaaaatcgcagccggactggctgtatctgcagtaatgacttcaaccttcgccgtgcatcccgctgaagcaaaaaccattcaagtaaaaagcggcgactctctttggaagctttcccggcaatatcatacaagtatttcagccctgcaggcggaaaataaactgaaatcaacgatactccacccaggacagcggctgcacattcccgacgggagcggcacacataaaacggggcaaaaaggaaaacgaaacactggtgcttacacagttacatacggagactcattatgggtgatcgctaaaaaataccgaatgagcgtttctgaactgagaagcctgaaccgtttgagttcagatatcatctatccgggccaaaaactgaaaattaaagggtctgccggcggcacggacggaggcggcagacagacaaagcctgataaaggcgcatcagggacttacactgtgaagccgggtgactcgctgtggaaaatcgccaatcaaaccggcatcaccatcgccgaactgaaaaagctgaatcaattaacatcagacatgctgtatccgaatcaagtattaaagatcaaaggttcttcacataacggaaacagcggcacaacaccgccatctcattcaaacccttctgagaagccatccacttacaaagtaaaagcaggcgattccctctggaaaattgctaatcggttcggcatcaccgctcagctcatcagagaaaaaaataaactgacaactgatgtgcttcaaatcggacaggttctgttgattaacggaacgggaaaaacagaagatcctgtgcggcagccgggtaacaaaccggcaaagccaaacaagccaaatactcccgaacctccggtgacagggtcaaagattgacagaatgataggcgaggcgaaaaaacatgtcggcgtgccttaccgctggggaggcaatacgcctgcgggcttcgattgcagcggttacatctattaccttttaaataaggtaagctctgtttcccgtctgagcacggccggatattggaatacgatgaaacatatcagccagccgtcagcaggcgactttgtcttctttacgacatataaagcgggcccttctcatatgggaatgtatttaggcggaggagattttattcacgcaagctcctccggggttgaaatttcaaacttaagcaatccatattggaaaaaagcttatttaggagcgcgcagttatttttaaaaaaaagcctttcggggctttttttgtttaccattttcacgttttgacaagactgatgggtaaaaaaataagggggaggaagcatgaatcgtctcttgctttttctcatgctcgcatcaattacgctttgcggctgcggggcgagacccgctcctgctccgcccaaaaaacatggggaaagccgcgcattggaagcatctgcataccgtgagcatgccggactcatcaatcaaaacggaaaaacgatcggatatatcgaagtgagggaatctgatgatgaaggatcagacattcatatatcagcgggacatctgccgcccggcgcttctctcggatttcatatttatgaaaaagggacatgtcaggcacctgatttcgaatcagccggcggtccgttcaaccctttgaacaaagaacacggcttcaacaatccgatgggtcatcacgccggagatctccccaatcttgaagtgggggctgacggtaaagtggatgtcattatgaacgcgccgcaaacttcattaaaagaagggagcagactcagcctgctcgaccgggacggaagcgcgttcgtcattcatgaacatacggacgattatttaacaaacccgagcggaaattccggagccagaatcgcctgcgctcccctgacaaaaagcgcccgcagggaatgagcccttttgtattgagtatacaagggcttttttagtatactcggttatggaatacaaatggaaaggaaacatcacctatgacttcagaattacagcacctatcacttccggaagatatacaaaacaaactgcaggcttatcaaaatcatcccgtttcccaagaattccgggatttaatcggatcatcaggctatgaggccgaagataaagcgattgtattcgatgccgtcatcgctttgacaatgggaaaaaatatcttattaaaaggaccgacgggttcgggaaaaacaaaattggcggaaacgctttcgaactattttcataaaccgatgcacagcgtcaactgctccgtagacctcgatgcagaagcgcttgtcggctataaaacgattgaaaatgaacaggggcaggcgacaattgaattcgttcccggacctgtaacaaccgcaatgaacgagggacattttttatacattgatgaaatcaatatggcaaagcctgaaacccttccgattctaaacggcgtgcttgattacagaaaaatgatgacaaatccctttacaggagaagtgattaaggcaagcgaaggattcggtgttatcgccgcgattaatgaaggctacgtcggcaccgttccgctgaacgaagcccttaaaaaccgttttgtcatcattgatgttccgtatattaaaggaagcctcctgaaacaggtgctgacctctcagtctgtcttaaaagatgagaaattaattgagcgctttatgacgctgtcttctgatttaatcgcacaagcgcataacggacaagtgtcagaagaagcggcgtccatcagggctctcatagatacgtgcgacttggctgcgtacatcccgccgaaacgggcgattgaaagaggcatcgtggaaaaacttgacgacgacagggaaaaagccgctgtcagaaatattgcagaaacgctgttcgaatgagggatatacaatgaagtttatcaaatttaacgacagcacgattgattcgtttttgttcatgatgctgactgatctggccaaaacactgaccagaagcagtgaagttgaagtggaatacggcgtgcagtcttactacaatccctttgaaaagaaaatttacatgagccacttttggaaagaccgatcagccggggatatggaagccggcctgaaaagcgatgtctatttgcgcgctgtcggaacacgcagcagctcatttcgggtatttgcggggtttttaaatgacgttcaccggcacttcacccgccaaagctttgccaagcagctgtttatgctgcttgaggatatcagaattgaagagcagatcaaaaaagaacggccgggaacgaaacgtgtttttcagaagcggagggagatgtacaggaaatatttcacgacgcagctgacattgaatttagaacggagcattttcaccgacgctttgtattgcgcgatgtttgtcaagctgacggctgagtctccgcttgaaggcattccttccatgcatgaaaatattgatatgatgataccgtatattgaacgtcagctcatccgggtgtatgaggcggattctacggaacaaatcgcaacaataacggaagacctcatggaaggccttgatgaagtgcttgagaaagatatgctgaacacatacttttttctgccggaacttgattacgaaaaagcggctgaagagcctttattcgaaagcgtaaaaaaagcgccttcgttaagtgacgatctcacgctccctgagtcttccgacggagatgaagaaatccttgaagagaaaatgaatacgtggcaccgggaaaccgaagcgccgtcaaaaagcttccttcaatttgatattgagcacggcgcgaaatcagatcttgggaaagacgcggccagagaaggcgatgacggtgaccaggcgctcggctccgttcaaggttccgcacgtcagacgaaaagagaggattactctaaactggaagcgcttgaatccattcaggatgaacatgagggcgccgggctggctgacggaaaagaaaacaaatttgccttcccggtttatcaaacgcctcaaaaagcgtctcctgaagaggagcagtcttataaagaacaggcaaaaacgatagaatcatatcaaaaacgcctgaagcagatgatacaaaaaacacttgagcacaaaaaaacgctcccgcggaccgaccttcacgcaggccggctgaatcgcaaactgatccgctattttacggaacggaacccgcgccttttctataaaaagcaggacccgtcttcagacattgacgccgtttttacattgcttgtcgattgttcggccagcatgtttgacaaaatggatgaaacaaaaagagggatcgttctttttcatgaagccttgaaatcagtgtccgtccctcaccaaatcgtcggattttgggaggatacaaacgaagcgaccgaaacgagccagccgaatttcttcaataccgtcattccgttcgaagagtcgctgctgcaggctgcgggtccgctgatcatgcagcttgcgcctgaagaagataacagagacggatacgccatcagacaaatgacgaaacagctgatgcggcggagtgaggcgcaaaaatttttaatcgtgttttcagacggagagccggcagcattcggatacgaacaaaacggcatcgtcgatacgagcgaggctgtcatcgaagcgagaaaaaaagggatagaagtcataaatgtttttctgtccaatactgcgatagaagaatcccagatgaaaaccattcaggatatgtacggaaagtacagtatttttgttccggatgtcgatcagctgcccgatgtgctgtatccgcttttgaaaaaactgcttcataaaagcataggataggctttttcctatgctttttcgctttttattttaaaatgatttaattttttcggtattgatctgttttttttactattttgtgaacaatcaaggtagaatccaaacgcaatcagtggtaaaatatccttggaagcgtttttattacataattttgggcacagcgttcaaaagttatttcaagatagtgaattgatcacttgattatctaggttgggggtaatattcaaatgtttcaaaataatatgaaacaaagaatgaattgggaagatttttacggaccgaacctcggctacgcactggagctgtacgaccaatatgctgaagatccagacagcattgatccggatctgaaagacatgtttgacgaactaggcgctccgccaagccaaataaaagaggcatcggaaacaaaggaacagggacgcgtcaccgcagatctgattcaaaagatcgcagcagcagttaaacttgcagaagatattcgaacctatggccatctgaacgcttccgtcaatccgctcagaaaggatccgaaaaagagcgagctctttccgttatccgagtacgggcttacagaagaagaaatgaaagcaatacccgcgtctgtcatctgtaaagacgcacctgccaatataacaaacggcttagaagccatccagcatttacgcaatacctataaaagaaccatctctttcgagtttgaccatgtgcatgatttcgaagagcgcgcatggattacaaaaatggtcgaatccggcgaactgttccggaaaaattcaccggaaaaactgtcagccgttttagaaagactgacggaagtagaaggatttgaacaatttttacaccggacattcgtcggtcagaagcgtttctcaattgagggattagacgcgcttgtgccggttcttgacgacattatcgcccagtctgtgaaggcgggcacaaccaatgtcaatatcgggatggcgcacagaggccgtttaaatgtgcttgcgcatgtgctcggcaaaccgtatgagattattttctcagaattccagcacgcgccgaataaagaccttgtgccgtctgaaggatcgaccggcatcagctacggctggacgggcgatgttaaataccacctcggtgcagacagacagcttcaggatgctgaaaccaaaagcgcgcggattacgcttgcaaataacccgagccacttggaattcatcaatccgattgtggaaggaagcacgcgggcggcacaggaaacaagaacgcaaaaggggtacccggttcaagacgaaacaaaatcgctcgccattttaattcacggtgacgcagcgttcccgggagaaggcattgtcgccgagacgctgaacttaagctcactgaaaggctatcaggtgggcggggccattcatatcatcgccaataatatgatcggctttacaactgaaagcgatgaatcacgatccacaaaatatgccagtgatttggcgaagggctatgaaattccgatcgttcacgtcaacgcggatgatccggaagcatgcctgtcagccgttaaatttgcggttgaataccggaagcggttcaataaagatttcttaatcgatttaatcgggtacagacgatacggccacaatgaaatggatgagccgtcaacgacacagccgatgctgtatgatgccgtcagaaaacacccgactgtcaagcggatctttgcggaaaaactcgtaagtgaaggactgatcagcgaggaaaaagcgcaaaacatcgaaatggcagtgacaaaacgaattgaagacgcctataaaaaggtgcccgccaaaaaagaagacgccgtacgggaaattgaattgccggagccggtgtccaacggttttccagacgttgacacagccattgattttgatgttctccgcaagctgaatggcgaacttatcaactggccggaatcctttaacgtgttcggcaaactgaaaagaatcctggaaagacgtgcaaaagcgtttgatgatgaccgtaaagttgaatggtcattggctgaatcgcttgcgtttgcttccattttgaaagacggcacgccgatccggctgaccgggcaggattcagagcgcggaacgttcgctcaaagaaaccttgtgctgcatgacagcgaaacaggagaagaatttgttgctctccatcacttagacgactgcgcttcttcatttacggtgcataacagcccgctctctgaaggatcggttctcggctttgaatatggatacaacgtgtattcgcctgaaacgcttgtgttgtgggaggcgcagtacggggactttgccaatgcggctcaagtctattttgatcaattcatatctgcaggacgggcaaaatggggacaaaaatcagggctggtcatgctgctgcctcacggttacgaagggcagggccctgaacactccagcggccgcgtcgagcggttcctgcagctggcggcggaaaacaactggacagtggccaacctgacaagtgcggctcagtatttccacattttaagaagacaagcgaaaatgctgcttcgtgaggaaatccgcccgcttgtgatcatgacgccgaagagcttgctgcgcaacccgaatacggtatctgaagtgcaggaactgagcgaaagccgattcaagcctgtctatgagcagtccggtctttcccatgcttacgaaaaagtgactcgcgtcgtattatcaagcggaaaagtgtcaattgatatcagcgatcacttcaacaaaatggaaggcgataaggattggcttcatattgccagaatcgaacagctgtatccgttcccggcaaaagatacgaaggagcttttcgccaaactgccgaacctgcaagagatcgtttgggttcaggaagaaccgcagaacatgggggcatggagttatatcagcccgtatctgacggaaattgcgccaaaaggagtaaatgtccaatacatcggccgaagaagacgatccagtcccgcagaaggagatccgacagtccacaaaaaagaacaggaacgcattgtatctgatagcttgactcgcaaaaactaagggggaaatgtaaaaatggcggaaattaaggtacctgaattagcagaatcaatctcagaaggaacgatagcccaatggttaaagcagcccggtgattatgtagaacagggtgagtacttgcttgaactggagacggacaaagtaaatgttgaattgacagcagaagaatcgggtgttctaaaagaggtattgaaagattcgggtgataccgtccaagtaggagaaattatcggtaccattacagaaggcgctggcgaaagttctgcacccgccccttcagaaagtgctccagccaatgaacaaacgaaagaggaagcaaaagctgaacctgctgcacaagaagtcagccaggaagcacaatcagaagcgaaatccagaacggtagcgtctccggctgcacgcaagctggcaagggaaaaagggattgatctatcacaaattccgacgggggacccgctcggccgcgtgcgcaaacaagatgtggaagcttatgaaaaaccggcttcaaaacctgcggcacagccgaaacagcaggctcaaaaaacacagcaaagctttgacaaacctgtcgaagtgcaaaaaatgtcccgccgcagacagacgatcgcgaaacgattggttgaagtgcagcagacttctgcgatgctgactacatttaacgaagttgacatgacggccgttatgaatctaagaaaacgccgtaaagaccaattccttgagcaaaacgatgtaaaactcggtttcatgtcgttctttacaaaagccgtcgtggctgcattgaaaaaattcccgctccttaacgctgaaattcaaggcgatgagctgatcgtgaaaaaattctatgacatcggtatcgctgtcgcggctgaagaagggcttgtcgtcccagtcgtacgtgacgctgaccgcctgacgtttgccggcattgaaagagagatcggcgaacttgcgaagaaagcgcgaaacaataaattaacattaggtgagctgcaaggaggctccttcacgatcacaaacggaggtacattcggatcgcttatgtcaacaccgatcctaaacagccctcaggtcgggatcttaggtatgcacaaaattcagctgcgcccagtagcaattgatgcggagcgctctgaaaaccgtccgatgatgtacatcgctttatcatatgatcacagaattgtagatggtaaagaagcggtcgggttccttgtcaccattaaaaacctgcttgaagatccggaacagctgctgctggaaggataatttgaaacagacaaaaagtacactgcccttacaagcagtgtacttttttattgagcgaaggggagaatttatatgaaaagctgttatccgcttgagatcgaatttgaatataatgaagaattgcattctatcactccggttcttctgcaagacgaacatgacacgatattaatagactgcggatatcccggttttacaaaccatcttcaacatgctgctgcccggcatggaatgtcgcttcattcattgacaaaaatcattgtaacgcatcacgacatagaccatatcggctcactcgctgcattacatcgtttgcacccggatatcagcgtgacagtacatgagcgtgaagcgccgtatattgacggctctaaaaaatctttacggcttgagcaggctgaatcaacgtttagttcattgccagaggatgcaaagccttatgcaaaacagttcatttgctcgcttcaatcagtcgaatcggctccagttcaccggacagttactgacggtgagctgctgccttggtgcggaggcattcgcgttgtagccacgccgggtcatacacccggccatatcagtctttatctgcctgccgaaaaaacaatgatcacaggtgatgcggtcgtcattgaagacggaaagctgaaacttgctaatcctgactatacgttacatatggatgatgcggtccgatctgtgcagcggctgcttgattacgatatccgccaattgatttgttatcatggaggtttatttcagggggatgtaaaaaaagcgcttttgcgcctgtttcgtgatctgcagaataatcaaggataggagcggcggcagcctatccttgttcagttatgaaaacggaatctttgccgtttcttcttcggcgctgtttttctcttttttcttagaccagtaggtggcaagaacagaccccgacagattgtgccatatgctgaaaattgcgctcggcacggctgacaaaggggagaaatgcgctgtcgcaagcgctgcgcccagtccggagttttgcattccgacttctatcgcaatcgctttttgtgaagcataatccattctgaacagctttgcagtcaggaatcctaacaaatatccgattccgttatgtaagatgacgacagacacaatcagcagtccggattgaagcagatgctcacgatttacgctgacgacagaggatacaatcgctacgatgccgattaccgatacgagaggaagtgcgtgcacggcttgtccgacctgttttttgaagaacagcttcacaatcaccccgaggacgatcggcaaaagcacggcttgcataatggaaacaaacagtgaaccgaaagaaacgggaagccactctttcgcaaacagcataataagtgccggcgttacaataggagcaagcaatgttgagatcgtggtgaccgcaacagaaagcgccgtattgcctttcgccaaaaacgtcatgacatttgatgccgtaccgcccggacagcatccgaccagaatgacgcccgcggcgatttctgcggggaggcggagcccgactgataaacagaaagccgcaagcggcataatcgtaaactgggcagcgactccgatcacgacatgccaaggctttctgattaattctttaaaatcgtctgcttgaagagtaagccccatcccaaacataataataccaaggaaaatcgtcatataagaactgatccaagaaaacaaatcagggcaggcgaatcccaaaccggcaaagacgataacccacaagccaaaggtttggcccgcaaacccgcttatttttttcagccattccataaacacagctccttttacatccaatcaatcagtcagaaaatatgactgacttttctgtactccattataaataatattctgaataattcaatattaaatataagttttcgataaaattattatgtaaactaatatcttcttgactattcagacatatattcttacaattgatttttatactgaaatgaattgggagtgctgaagtgaaagaagctaatcaatggtcatctaagctgggatttattttagctacggccggctctgcaatcgggctcggcgcaatatggaagttcccttacgtagcgggaaccagcggaggcggcgcttttctgcttgtttttattttatttactgttttaatcggactgccgcttttgcttgctgaatttattatcggcagaaaaacacaaaaaaacgccgttgaatcctataaggcgctggcgccggggaaaaagtggcactggatcggatatctcggaatcataacgtgttttattctattatccttctacagcgtagtggggggatggatattaatctacattataaaaggctttacaggcggtttaacgctttcttcgggatttgatacgttatttatcgataccatttcaaacccttatgcagcggttttcggtcagctgctgtttatcgtgctgacgattttagttgtggcaaaaggggtgagcagcggcatcgaaaaggtaagccaggtgctgatgccggctctgtttattctgtttattcttttaatgatccgctccgttacgctgcatgatgcagcgaagggattaaaattcttcttcatgcctgattttggcgcgatggatgccaataccattttatatgcgatgggtcaatcatttttctcgttaagcgtcggagtgtccgtaatggttacatacagcgcatatttagaaaaagaagaaaatattgttcaatccgccgtatcggtgacggtattaaatgtccttgttgccgtgatggcgggagtggcgatttttccggcggtatttgcattcggtctcaagccggatcaaggtccgcagcttttatttaacgtgctgccgaccgtctttaaccaaatgccgttgggcatcgtgtttttactcgcctttttgctgctgtttttatttgcgacgctgacatcggctttttcaatgcttgaaattttagttgctgttttgtcaaaaggcgattcggcaaaacggaagcggtatgcatggatcgggggacttgctatatttattgtcggggtcccttcggcgctgtcgtacggcattttgagtgatgtttctatttttcaccgcagtatttttgacgctgcggattttctggtcagcaatgtcttaatgccgttgggcgcgcttttaattgccgtgttcgtaccgctgaaaattccgaaacagatgctgtttgacgaactgaaaagcggttccggtataaaacgaaaatggtttgcagtctggctcctattaatccgttatgtggctcctgtagccattattatcgtttttctgcacgtgcttggtattttttagaccaaaagaagcaggcccccgttcaagacgggggccttttttaataaagcggccacatcacgcggtgcgcttgctcgaaccgtttctccgcctcccgccaatcaacgacattccaccattgatccacgtaagccgcgcggtcgtttttatattgtaaataataggcgtgttcccatacatccagcggaagcaaaggaatgacgtcccattggctgtagagctgatgcttctcagcggccaaaatctccagccgcccggagcgcggcgcccagacaaggatagcccagccgactccttcgactttttttgctgcttgagaaaattgctctttaaaagcggaatagcttccgaatgacacatcaatcatttgaaagagcgcacccgtcggccgtctttttccgtttggattcatggaaaaccaaaaaatactgtgcaaataatggccggcaccgtgaaacgccaattgccgctcccaatgcgccactaagtcgtactgtttcgtttgtctcgcttttttgagctccagttctgctttattcagaccgtcaacatagctctgatggtgtttagtatggtggagtttcataatctctcttgaaatatacggttccagtgcggaataactgtatggcagtttagggaggacatgcttgccgatcggcacataggctctgcgctcatccggctcttccggttcggtaatgtcccggtaaagtgctgatgcctgttcgtaccattccgcctccgttaatccatcatcctgaagggtgtgaaaaatccggtcgatttgtgccgcgaagcgatcgaaccgaccttgctgtatgacttgttccttcaaggtttcacaccaattcagcatttcggtttgataagcgtgccgtttcatttttcttcctccttttcactcactttcataaaagtgctgagcgcaagcaaagaaaacacatacgggtagctgtgatacctgatgtaaaactgtttcggcaggccgattccggtcggatagctgaaagcgtctccttcgtaatgccggttttcaataagaaaagatatgccttttgtgacggcttgatgatgaggtttttcgtattgcagcaaagcttcggccgcccaagccgtctgtacaagcgtcccgtaagaaagcggaacataggttttgacttctgcgcttttacaggattctccccagcttccgtcctcgttttgaatggacttcagccagcggatcgcttttttcacggccgggtggttttggctcacgccgcaagccttcatccctgtcagcgctgcccatgtgccgtaaatatagcagacaccccatctgccgtaccacgatccgtcctcttcttgatggcggatcagccattggacggccttttcaatctgagggtgatcaggagaaagccccgcttctcctaaacagtgcagcacccgtccggttaagtcgcttgttgaaggatcgatggcagcttcctcagccgattccagcggcagcaggcggaccagcggatgattgacatttttctcaaaagcagagaagccgccgtcactgttttgcatggacaaaagccagctcagtccgcgttcccatgaggcgggataacgttttcgcgggatggctttgagcactgcggctgtgtcatcacaatcaggattatttgtattaatgtttgaaaaaccccatcctcccggttcagcatgcgggttgtgaacggcccaatcagcgactttcgtctgctgccgttcacgcagaaaccgggcggctccggttatcatttgatcgttatctgagatgccgcttttcataagcgcatagctgagaagcgccgtatcccaaacggtcgacgttgaattttccaggtacggtatatcgctgcaagacgtgagcaaagctttcgtgccggcaagcgcttttctgataacgggggagtggcgcgatacaccgagagcgagcaggccgtacaccataaaaatagtggcactcgcatagctgtataatgtgccgtcttcttcaatccggtcaagcatatacgttttggccgtacgcagaccgagctggtgaaaagcggcaggaatctgcaaaagccgcttccagtgcgcgaaaagagaagagaggtctctgttctcatcatgatcggaacgaagccatgtaaacggatttttagtcatatgccgatctaaatgcgcgagagacggaacattgggatttttcagcgaaaatcttttgttaagcgtcacggccatcggtacgaaatgaatacgagcgtatgtactgaactggtaaaaatgcagcgggaaggatgggggaatgactaagaaagataatggcagatgcagcgcgggccatgggtaaaggccgtttgccgcaagcatccactttgtcatgaagtgtacgttgcgcaagccgccatttgagatgataaagcgttcagcctgaatcatatgcgcctcagaacggctatataaaccggaagccagcaagccggcatagccctgtacagtagcggtcacatttcctttccggtcatcaggatagttggcaaaagttccgtccgggcgctgtttagcgcgaatgccttctgcaagctcagcgatcagttctttatcattgtctccaagagaagtgagaaggaggatcagaaaggcgtttgtcaaaatcggaccttcaaaacaaaatgaccatgagccgtccgcattttgcgtttctcttaatagggagatggttttcttttggcggcttctgacgttttcatgaattgtgctcacactcgctcaactccttcagaagcatatatattcatatgtaaaaggcggcatgacaaaagaaagaaactgctgacaggcagcagtttcttgtttgatttaatcttccaggttgatccagacgcttttcacttctgtataattattcagcgcgtaagagcccatttcccgcccgaggccggattgcttatagccgccgaaaggagatgccgcatcgaaaacattgtagcagttgacccaaacggtgccggcttggagacggtcagcaatgtaatgagcgtttttcacattttcagtccaaagtccggctgcaagaccgtattccgagcggttcgcccgctcaatgacttcatcaaccgtatcatacggaatggcggctaagaccgggccgaaaatttcttcttttgcgatggtcatgctgtcatccacatccgcaaatacagtcggggagacaaaatacccttcttcaaacgggcagctgccgcccgcgacagctttggctccttccgcttttcctttttcaatatatgaaagcacgcgctcatgctgttcctggctgacgagcgggccgatttgtgtatcttggtgaaggccggcgccttgctgaagcgatttcgcatatgaaaccatttcgctgacgacctcatcatatttgtctttgtgaatgaagacacgggagcctgcgcagcatacctgtccctgattaaacatgaccccgtttaaagcgccgggaatggctttcttcaaattggcatcaggcaaaatgatgttaggtgactttccgccaagctccagtgtcacgcgtttaattttttttgcggctttttccatgatttttttgccgatttctgtagaaccggtaaaagcgagtttatcgacatcgtcatggttggtcagcgcttccccggccgtctcgccgaaccctgggacaatattgatgacgccgtcagggaagcccgcctgatctattaattccgctaaatagagggcggtcagcggtgtctgctccgccggtttcaaaacgattgtgcagcctgtggcaagggcggcgcccattttccacatcgccataaggagcggaaagttccaagggatgatctgccccacgacgccgacaggctcatggcgggtgtaattaaaatatgagccggcgaccggaatcgtttgtccggttatctttgtagaccacccggcataataacgcatatgctcaattgcgagcgggatatccccattcgtcgtttcattaatcggttttccgttatcaagtgtttcaagctgcgcgagttccgttttgtgctcttccattaaatcggcaagcttatacatcagcctgcttctggaagcggccggcatagtgcgccattcgccgtgatcaaaggctttgcgtgccgctttcactgcactgtcaatgtcttctgtctgtgcctcgtaaagcgtcatcagcgtttctccggttgccggattcggtgtgacaaatgttgatcctgaagcgctcggaacaaattttccgtcaatataaagtttcttcgtaccctgtaaaaatgtttccagcctttttgtgatctgcatcgttaaagaactcattcgtaacaaacctcccgaaattttttatggtctgttttgagcatcttgatgtccgcgcaaagtaagcgcatacagtcattctataataacacccccggtaaaatcaatcgataaccgttattgcaattcacaagaaaaaacggctacaataagcttatcgattaagaaaaggagttttataaatgattcataataattggcagacaaaagaaagcgtcaaaaaggtcaaatgcgtacatacagatgcgaaaaaatacattgtcaaaaatgtgctgacgccgggtaaagagtatgaagtcaaaaatgaaacagaagaattcatttttgttgcagacaatacaaacaaagtcggaggcttctacaaagagtattttgaagaagtttaaggctgaatgaattcattttgcctgagccatactaaaaaagactacatataaagggtggctgcaaaatgaaaaaaacagagcaagacaaacaaaataaaacatcagatcagcttcagcaagtgcaacctgaagaaggcaccgacacgacgatggaacaaatttcagatacctataaagaaggaacaattgaagatacggatcgttgatgttttgttgaaaccgcggcattggagaagccgcggttttttatggcgaaaataaaaaactgacttttcgaaaaaaataccgttttcttgaaaccttttcttccgctgaaccgtattacttcataactgcggcacctttcgcgaagggcttttttgatgaacgttctaaaaatgtaatctgttcgtaatggtttaaatgccgtctatgtcgtattcttatatagggataaagaacttattttttatgattgtaataaaacaatagtatagaagcagaaagtggggttcttcattgggaattttttctgtcagcagatcaaccgacacaaaaaagctggaggctttgctcgttgagggagaacggatcgaaacgatttataaactgcgggttgaccaaatatgctttacgaataaacgagtgattttctttgataataaaatgttctccaaaaagaaagtgcgcgtatttcttccatataaaacaattgaaagcttcgccattcaagaagcggggatgtttgatcccgataccgggcttgtattaatgacaaggggaaaaactttcgaattggaatttgcaaaagaaacggacttgactgaggttcaagccatcttaacaaaatacttatgcagttaaatatcacataaaagccatccgaatgcatgcggatggcctttttattatataatgcttgtttttccggagttcgaatcaatgagatccgggtcagcgatagaactgatggggatataaatcggcgccaaatcaccattttcttcaccgaatccgtagttgatcttattggataaaaaataatcgatttgctgatacgggccgatcgtaatggaagaaccgcggtcgaccgcatttactttaaagcctcctacatttaccaaaaccggcgaaaacatcataatgggcctccttttccggcagggattttgtcgcatgcagactcaaaggttgatggagaatcaatttgatcccggtcatccactttgccgttcgtgccgatgaagccgcttgcatctccgaagttctgtccgtatccctgattctttttatcagaattctgccattccgccagtaaattttgtccgacattcaccgctgaagcattttcaaaggaattaattttcaacatgaaaatattaatattgatatatggagttggttgaaccacaggcaaacctcctttaatacaggtgtatgccggctgttatgaccgtatgcttagacagggggcgataaaaatggatttcgataagatgaagcaatggatggaaatggcgcaaaacatgtccggcggcgacttttggaaaaacgtttttgatgatgaacaactgaaatcatttcaaaacggccattctcattttccctttcaacagggagatgggcaaatgagaagaaatgaggatgcttttcctcttatagatattgtggaaacccatgatgagctccaatttttgctgtatctgcccggctaccggaaacaagatgttcagctgttgtcctacggagaatatattgtcgtaaaaggcacgagaaaatcctttttcaatgaacaggattttaaacagaagaccggaaaatacggcgattttgaaaaaaaactcgatcttccgcattccgctcaaggtacgaagggaatgcaggcggtattcaaagacgggattttatatatatcgattgctaaacatctgggggatgcaagccagatcattatcgaaggctgatcttgttcgctgtgccatctatcagatctgaatcatcgatactcatgatagggatggcgacaacggtgcaatcaccgttttgttcaccgtacccttcatttcttttattggctgctgtgtttctcaccataacggaagagccggtgttaaaagccgctccgccgctgattccgttcatttttatatactcaaagttgataacggatggaaaaaacatcatgattcgcctcctttttgtatatcatgtttatatattcgcaatacgggacgcatagaactttccaagagtgacggggaaagaagtgattttctttgaaaaaaataatgaaagagattttcaaaaaagtgtgtgaagaagaattagaccggcttaagaaagtggaacaacagcttgatgagcttcaggataagtgtcattttgagccgcaaacggttgaaggggaaaaaacatatgtccatattgagcacgtcaaagtggacaagattgaatacaatattgattttgaacagctgagtatagaagagctgagcggtatgctgaatatcggcgccacttaccatacaccggcgcacaggctcaaacaagcctgcgctgaagaaagtcgggacaacccgcaaaatgatgctgcgaaagaaaaaagacagacaaagcagcagacacccaatgtcaccatcagggggagaaagcattgacccccattgtttcatcctcctttttcgagggtatgtattaacagatgcagcgaagaatacagacgaaaaaggagatgatgaatatggcattatcaaaagaacagcaggacagcctttatcataaattaatcgatttaaaggaaagtcttcagggagaatccaaagaaaatcattcaatgagcgaagacacaggagaactgtcgaacggagtagataatcacttagctgatcacggaagcatttatttggacagggtcacgaatcagacgctggacggtgtcgatcagaatcttttagatgaggtgaacgccgcgcttgaacgaatggataaaggaacatacgggatttgcgagaaaacgggaaaagaaattccttatgaaagacttgaagccgtaccgtacgccagaatgaccgtcgaagcgcagcgagaaacagaaggggatgtgaaaacagacgctccgtcatatgaaagggaatttcacgagcaggtgaaagacctctcaaataaagaaaccgttgatcaaaaaagctcacaaacttacgaaatcctggatcgcgagcaggattcacaataatagcagcaggtacattcatatgtacctgtttttttattccataaaaaatctcagaatcgaaataaaatcattgactttatataaaaaagaaagtaacatactatttgtaagtaaatattaaaagattaccgggaggaatttagaatgtctcaagtattatttgtaaaatcaagcgaccgtacggctgaagaaggcgtatccgtaaaattatacgaagcgtttctggctgcttataaagaaaacaatccgaatgatgaagtgatcgaacttgatcttcataaagaaaaccttccttacctcggaagagatatgattaacggaacattcaaagcttctaaaggaattgaaatgacagacgaagagaaaaaacaagcgtcaactgctgacatttacttaaatcaatttgttaaagctgacaaagtcgtgtttgcattcccgctttggaacttcacagtgcctgctgtgcttcatacttatgttgattacctgtctcgcgcaggggttactttcacatacacgcctgaaggccctaaaggtctgatgggagataaaaaagtagcgctcttaaacgcacgcggcggcgtatattctgaaggaccgatggcatctcttgaaatgtcattaaacttcatgaaaaccgttcttggtttctggggtgtccaagatcttcacactgttgtcgttgaaggtcataatgctgcaccggataacgctcaagcgatcattgaaaaaggactgcaagaagcgaaagatctggctgcaaaattctaattgccataactcttgcgcccctacagggtgtgagagttttttctattatagaagaaactggcggcagctttcgattcaatcttatattgatatattgatattttgtcgaaaaaacaatttttatgtagaataaagcatttttcacaaagaaaaaaggttttctgtaaaagaattaaccctcttgccaaaatacgactgatggtgtaggatataagagaagctacattgttcgtattgttaattaagttttaacctttaagctgtaatagggagttttatatcgaagccggaatgtcatgcctccattgcagaggacgacaggaacgcttctgcaaacacccactttgaggagtggtggtttaaaactttcttacttgcgtacggcatacgtagcgaaagccatttcccttgcggagatggctttttattttgaattgcccttgagcagcgtactttatcagtatgataaaatgaaagaatcaaagacaaagtgaggttttacaacatatgctggataaagcccaatcccttctggcgcattattttggctacgacagtcttcgcgcgggccaaaagcaggcgatacaatcagttgcagaggagagaaaaaacacggtctgcattatgccgacggggggcggaaaatcaatctgctatcagattcccgcactgctgtttgaaggaaccacaatcgttatttcccctcttatttccttaatgaaagatcaagtcgacgcgcttgaagaagcgggtatcgcggcagcttatattaacagcacccagacaagccgtgacattcatgagcgcctgaccggtttgaaacaaggggcttaccggctcttttacatcacaccggagcgtttgacttcttctgaattcattcacatcctgcagaatattacggttcctcttgtcgcaattgacgaagctcactgtatatcgcaatggggacatgatttcaggccgagttaccggaatatcgaaatcctttttaatgaattaaaagaaccgcccgtcatcatcgccttaacggcgacggctacgcctgaggttcatgatgacatctgcaagcagcttcatattaagaaagaacaaactgtatataccggttttgccagagagaatttaacgtttaaagtagtaaagggcgaaaacaaagaccggtttatcgagcggtacctcgaaaaaaataaacacgaagccggcattatatatacagcgacaagaaaagaaaccgaccgtttatatgagaaattaaaacgcagcggcatcaatgccggccgttatcacggcggattggcggatgatgacagaaaagaccagcaggagcgttttcttaacgatcagatacaagtgatggtagctacgtccgctttcggaatgggaatcgataagagcaacatcaggtttgttttacacgcgcagattccgaaagatatggagagctattaccaggaagccggacgggccgggcgcgacggtcttaacagcgagtgtgtgctcttattttcgccgcaggatattatggtgcagcgttttttaatagaccaatcggccgccggagaagaaaaacaaaagcaggatctcaaaaaactgagacagatggtggattactgtcatacggaagattgcctgcagcggtttattctgaagtatttcggcgagaatgaggcggaagcttgcgaagcgtgcggcaattgcactgatacaaggaccgcccatgacgttacaaaagaagcgcagatggtattgtcatgcatcatcagaatgaatgagcgcttcggaaaaacgatggtggcgcaggtgcttagcgggtctaaaaataaaaaagtgctggaaaacggcttcagcagcctgtccacttacggcattatgaagcatcaatccgcagcggaaatcagtgattttatcgaatttcttatttcagatgaatatatcagaatggcggacggcacatttcccacgcttatggtcacccaaaaaggcagggacgttctgcttggaaaaagcgcagtcgcgagaaaagaagccttacaggccgccgccgtcaccgaaaatgatgaattatttgagcttctccggcgtctccgcaaagagattgcagctgaacagggtgtgcctccatttgtcgtgttctcagatcagacgttaaaagaaatgtcggcgaaacttccgaaaacagatcaggatcttctttccgtaaaaggggtcggggaacaaaaaagattgaaatacggagcggtttttttagaagaaatccgaaattatgtaagagaaacagagtgaaaaaaagtttttttagaaatttgcacattgtgtttttcatgggcgccggaaaaatcagaagcttgaaaacccttgctgtatcaaggtttcagcaagacttaccaagcgagagaaatgtttcatgtaaaggaactgtaatctaattcaaatcgttttgttattgaactgacattttcatatgttacgatatcacctgttagccgccaataaaaagctaacaagggaggatttacttatgaagaagacgattatgtcctttgtcgcagttgcagcaatttcaacaactgcatttggagctcacgcttctgctaaagaaatcacggtgcaaaagggtgacacgctctgggggatctcgcaaaaaaacggagtgaacctaaaggacttaaaagaatggaatcagttatcttctgatttaatcattgaaggagagaaactgactatttcttcagtagaaacaaccacatctgggcagtacacagtgaagcagggcgacagcctctggaaaattgctcagaaattcggaacatcagtcggcaatctgaaaagcttgaataacttgcaatcagatataatttacgcaggcacaacgttaaatgtgaaaggtcaggctcaggctcaggctgcacagccggctcaagaagccagccagccgcaaactgaacaaaaaccagctgctgagacagaacagccgaaacaagaagctgtcaaaaacgagcagcctaaacaagaacctgttcaagaacaacaacaacctaaacaagaagcgaaggctgtcgaagcaaaacagcagcctgttcaatcaaatacaaaccaacaagagcctaaaaagcagatgacaatgactgcaactgcttactctgctaacgacggcggcatttccggtgtaacggcaaccggtgttgacttaaacaaaaaccctgatgcaaaagtcatcgcggtagaccctagtgtcattccgcttggctctaaggtttatgttgaaggttacggagtggcaacagcagcagatacaggcggcgcaattaaaggaaataaaattgacgtatttgttgcaaagaaaagtgacgctaacaactggggcgtcagaacagtaaatgttaaagtattagactagtttcatatagagatgaagaacacaaggcgaaatgctttgtgttctttttttcttcccttttttgactgtatataatcgttatatgcggaaaaagaaaaagcgtttctctaatataataaggaatggatgtgaaaaaagaatcggaagggatgaatctgatggagccggaatgtatatgtttatggaataccttcacagaatcaccggtgtttcaagcaggtatatgcaccgctttcgccattgtgctcgttatcggactgtctatgcctgctgtcaggctgtttcaggcgcttgacagagggagaggaaggccagccgttattgaaaaggtgagacgtactggcgtgatgaagaatggcaggcacgagcttgtacttattttaaacgtaaaaaaccaagacggaacgcatgataaacgtgaactgacacacgccgtatataatgaagagatcagccgtttttatgaaggagcttccgtatgggtgagggcagcggctggcggacgaattatgatcgctcctcgcacgccgcggcataaggcgtcaaaataaaaagacggggcggttttcccgtctttatgtattaatgccgatcgatccatatccgtccgccttctgagccggcttctatcctgcatgctcctccgatcgggaatgtcatcaaaggggaggtatggccgaaatcagcatttgcgataacaggcatggatgacagttcttcttttgtacggatgacggcacgcagagcctcctcagacacatttgaagcatgctggaaacgtccgatgacaattcccttcacggctgaaaaagcgggaagatggatgagtgactgcaaatcccggtcaaacatatgaatgtccgacatatgatcatcttctataaacagaatcacttgttccatctccggaaagtattcggtgccctgcagaagattcagcgtgcatagatttcctccgatcagtgttccttccgcatatccgggctgaataacgagcggtcccggattccgataaaaacgtctgtcctcctggttcaaataccatttatcatcactccactcggatgaaggttttacctcatacgggttgtcagaagcacagcaggccaagaaagagtcaatcgtatagtccagcccttttttcatggcaaatgaagaaaaatggggaccggaatatgtaataaggccggttttttgatatatggcatggccgagagcggtaatatctgaatagccgcaaaggattttcggatgccgcttgatgttttcataatcaacgtagcggagcagctgatttgattggaacccgccgagtgtcgtcaaaatcgctttgatgtcaggatcagcgaaagcttcgtgcagatcccgtacacgcgattcaatcgatgatgaatgaaattcatttatttctttcgcattctctgaaaaagagacacaaaagcccagctcctccaattttgtcttcgcggcatttatattttcatctgacatagcggacatgcttgtggccggagacacaatacggatgccgtcgccttttttcaatttttccggatacaaaaaaaaccctccttaaatggtttaatctattacaccatattaacgagggtttatctatcattttttacaggtcgacccatttaatgccgcctgattgcgtatcattgtcaatccagacatcaaattgatgcttttcataaaaatgaacgagccggtcgacatgatcccaatcacgcttagcgatgtcgcccgtcactttcgggatattctgctctctggcgatatgttttaaaaatttcatgcagatcgagccgtagccgtggttcggcgggcctttaatatccccgatatgaatggcattgtcataataagaagcgatcagtgaaaaacagcctcttccccggtaggctgattcacaatcagtcagcataatcttacatgtttggccatcatcaatcgaggaaacaatgatccaatcgtcattgttcgattgatcaataccaagcactcgcgcgtcttttgatacatctatcagattttcccgcattctgaaaatctgaaattcaagtttatgaagctctttttccagctctttctgatctctttcttctgcagtaaacaaaatcatactcctttcacagcgtaaaagtcttagtcaaacacaagtatccattgtagtaaatgatgtcttggtttgtaaatgggttttgcaaaaacttttttagaaaagtctgccgtttatatgtggattgacgtttttaaggcggtggggatagggaaaggaacagtgagcagcggaaaaaggaggaatctataatggcaattgactcactcatcggcaaattgaagtacgtaatgacggaatctcctgataaaatgctttccttatatgtaaatacggatatgagaaatccggatcagcaggggggagagtggaaaatcgccttgaaaaccggttttcggagattaaaagagtatctgtctgtaagtgatccggaagaagaaaaatctctcgtccgcatcatgcaacgtgtctatcaatatatcgatgggcttggtaaagagatgccgcgaagcctcgtattttttgcatcgggggaaggcggtgtctgggagacgattgaattgcaggtgcctgtcgaaacacgattttattgggaagaaacggctgtccttgatcaattagaacttctccgtgaacaatttccaagcacggcttttattctcacccagcagaatgaagtgaagatcatagaaaccgtactcggaaaaattgaaggggtggagcattatcaatacgacgtcatcaatgaatcgtggaaaccgcaggatgtaagcggaagctccgcatcaatggacgaagacgccgccaaagcccatgtcgaagaaaaccaaaacaggctgtataaacgattggcttcaaaccttgatcaaaaggccgcttcacaccaatgggagcgtctcgtaatcgcaggggacaaagaaacagccgatattctcgatcagcatatgaataaaccgatagatcggatcattccaaaaaatctgttgaatgaaaacgaacataaagtgatagaagaactgttgaaggaagcataatatgacgaaaggccgggtctcaaacacccggtctttttagggcttaagtttgtctaatttctgacgaagcggacgaaaccgttgacatcaaagctgaattctcataccatttggatagtcagtaaaattgagagaggtcataagatgaatcagacagaaaacaaacctaaaagttataccggtatcgtgctgacattgaccgttttgatcaacgggttaattgcggtgctgttttttatgccgaaatcgggacaggtcagcattgccaatattcatattctgccgatgttaaatgctatttttaacagctttacttttatctttttgctggcagcgctctttatgattaagcaaaaaaatattcaagcgcataaacgctttattttggcggcgtttacgacgactctgctgtttttgatctgctatgtcgtgtaccactcgatagctgagaatactttattcggcggccacggcatcattcgggggatttatttctttattttgattacgcacatctgtctttccgccgttatcgtgccgcttgcgctgtttacgctgatcagaggattcagcatgcaggtggagcgccacaaaaaaatcgcgagatggacgatgccgctctggctgtatgtcagtctgacgggtgtcattgtatacttaatgatctcaccgtattattaaaaaaagccgtgctctgcgcggcttttttctattgatggaaaaaggcgcctcatcagggcgccttttactcttcaagcgtttcaagtgttgttacatttaaggattgttcaacggtttttgtttttgcttttactttttctgcgtacgtgtaatcaccatagcagtagggataacggaaattgtctttgttccctccgcaagtgtaaagtttcggattctttttgacctgctgctcggagtattgttttgccagttcctcagtatgcgatcctccatgttcagccacaaaatcaatatagccggctcccatgttgtagctttgtataatcgtatccaagtctacgccttttttcttgcctgtttggtacatgagagtgaattgtttgattccctgtttgatactggtttgagggtttttaatctcatttcgctttaaacccagagattctgaagactgcatgggatcatttcctcttccttttgactcctgatatatcatgccgagtacaagcgatgtatatttggtgagtcctttttcatccagctcgtcttcaacaagcggtttgtaatctgtcagccgttcaagcacgatcggtttgacatcaaacggaagacttttgagccattcattatttgaaaataacagaatgaggaagaaggaaaccatgacaaaaacacatatcatcataagacccgcggcagcgaaacagccttttttctttttctccactgtgtttcaccctcaatttcaggagcattatgactttttcattatgacacagatggatgcgcgaaaccaagcggaaacccgtatttgaaacataaatttaaaataacggttcttttgtcaggcgcaggatgtatctgcatcaattgacatttggtataattgggctacttgagaaaagaagggtgaggtatatgactgaatttcacgaatccggaaagacgaatgaccccgctgtcgatttagatgaggaaactttatttttggttgcccagacttttaaggcgctgtctgatccgaccagaatcagaattctccatttgctgtcacagggtgaacacgcggtaaatgatatcgcagaaaagctgaatttgctgcagtctaccgtttctcatcagctgcgttttcttaaaaatctacgcctcgtcaaatcacgcagagaaggaacatccatctattattctcctgaggatgaacatgtgttagatgtgcttcagcaaatgattcaccatacgcggcacgattaaaaaacatccctgctttttagacagggatgtcagccgtactgactgttattggtttggtctctgctcgtttttaaaacataaaaagagaagccgctgtaataaactgcgatgaaataaaagatactgatggtcagcggatcggccccgaccgtttggctgtatgcctccggatgggtaaagtccgctgtgacccggtaaatttcaataacgcgataaacaaatctcgataggaaaaacgttaatagaataagttcaatccacagatgagtgcgaaaatacatttttccgcggcgttcttcaaaagaaatattccgtttggcaaacaggaccagaagccagccgcaaaaagtgccgaatataagatggccgtataaagccgggtgtgtgatgctgaaaaacgccagagctgcggccagcaatgaaaacaaaatcattcttgtataaagccagcggggtttcaaaggctgaaagccgacggaccgtttcacctttttatacagaaaaaaggcaatcattaagacagggcagatgctttgaagtgtgatatgcatggtgtgaaactccccctccgttgagtagtgtatgcttatccggctggttttagtagtctgatttattcgcaggctgaaagcatcttttatcacagtatgcgcgtttcttttttttgcataagagaagcgcccgcgcctttttcaggatttaaacagaaaactcttgataaactaacggtattagttataataaaactaacgatattagttttagggggatgttgatgagaatcttacaatacggaagggtttggcagctgactttttttccagcgcttttcccggtgaattgttatttggtcgaagaagaagtaggagtaaccctgattgacgccggactgcctaacagtcataaaggaatcaaacaagcattgcggcagcttgggaagccgctgaatgacatattactcacccacgcgcacggggatcacatcggttcgcttgactcattagctgcggaatttccggatgcctccgtctgtatttctgagcgggattctttcttgctgaaaggtgacacttcattatttgagcatgaagcacaaacgccgataaaggggggagtgccgaaaaatgttcagaccgaacctgatcgcctgctgaaaggcggcgagcggatcggatctttacttgtcattcccgctcccggtcatacgccgggaagcctcgcttttaaagatatgagaaatgatatgctgatcgtcggagatgcctttcaagtacggggcggccttgctgtttcagggaagctgaaatggaaatttccgtttccggcttttgctacgtggaataaagaagaagctgtaaaaacagcaagaacgcttatcgctcatcaaccaagcagtctggccgccggacatggaaatgttctctgcaatcccgttgaaatgatggctgaggctgctgaggaagctgaacgaagcctgccgggaggccgatcataatgtcaccgagagtcggaatgagccttgacatgatattgagagccgcagcaggcatcgctgacaaaaaagggctgaacgaagtgacgcttgcggccgttgcaaagtccttaaacgtaaaaccgccttccctttacaattttgtcaatggccttcaaggaattaaaacagagctggctgtctccggtttaactatgttatttgaaaaaatggcggcctctgcagaaggactgacgggtgaaacggctttgctcgctcttgccgatgcctatatcaatttcgccgaagccaatcccggattatatgacgcaacatttcaaaagataaaagacggccggattgagaatctgtcaagcctgcttgtagagcttgttgtcaggcagctgacagctaacggttatgcacagtctgacactgcgattcatgctgcgagaggactgaggagccttcttcacggctttgccgtgttgagaaaacagagtgcatttgaattaaccgaatcaattaaggaaagccggaagtttgcagttgttgctttcctaagaggtttacagggtaggtaacaataatattattatgtaaactaaataaaaaaacgcatcagtaaaaggagggacaaatggattcattacaacatatcatttgtgagcggcgcacctattcacatatttttgattctcatgcacacacatactgccaaatgctctttccgctcgaaggacagctggacttggagacagaaagacgtgaaatcagattaaaacctgatcaaatgctgtatattccgcccgggcatgaacatcggttccgttctttggagcgaaacgaatgtctcgttctcgacataccggcatattttttcaaaggttcatttgatcccggcgttctgaataagcttgattctttttggacatcgattcggtttctgctgacagaagagactaagcagcagtcggctcattcattgagtctgcttgcagaatatattgctgaaaagatacaagaaaaccgtacgaatgattcaattgcgtatatccgccgaaatctctcaaagactttttcaattaaagagcttgccgcaatggaacattaccacccggcgtattattccgactggtttaaaaagcagacagggaaaagcccgcaagcttatattgctgagctccgtatgaagaaagcggaacaaatgcttattgaaacaaaatgccggctgacagacatcagtcaggaggtcggctttcaaaatttgtcttcctttaccagatggtttgtcagacataagggaataacgccgcgcgtcttccgaaacacctttcaatctgataaataatcctgaaaatcagttaaataaactgcgtctttttttggtatcatgattgtaaaaaaggagtttttgatatggcagtcatcgaagattttatcaagctcgatctcagaataggaacggtcgtaaaagcggaagtattcccggaagcaaaggtgccggccattaagatgacaatagatttcggcgaagagatcggcatgaaacaatcaagcgcccagattacaaaacggtacgaaccgggtgatctgacaggcaggcaggttaccgctattgtcaactttccgccgcggcggatcgccggatttaagtcagaagttctcgttcttggcggcatcccggaaaaaggagatgttgtcctgcttacgccagagcagtcagtaccgaacggaacgaaaatcggataataaaaaaagacgtttgcagaagcaaacgtcttttgcgtattgaggcgatacaccacacgccacattcgtgtgtgccgcaagggcatgtgcatcggcttacacaattcagctcatcgctatatgaatatagcatggccggtgtggaaatgcaagagattttttaatatatgttatatctggctttgttttgccgatccccgattccttcgtgtaaggttcgtttgaaattttatgatcttgaataaagcagttcgacaaatgcaagagggaatttgagcaagttgtgaccgaagtgtgacctggaattaaaatccgggtctttttgtgtaaaagatgcatgcgaagagaccatataggcattaaatgttattactgatgtcttcatttatcttttggctaagtttctgaaccttctctttaacatttgaaacagctcttttttgaatttcatcaaagttctcctgaatatagtccatgacacttcttattataacttcactttcaaaattgaatatctcatttatttctgactgttcttcatctgttaggtgatggtattgaagttgtttagcatttacttcagcagctgcatcaatcctaacttagttgttctggctgtacaatttcatattcaccttctgcatacttttgctccgcataatggtctccccattgacagagctcctgcaagataggtttaagagattctccaagttcagtggatgaatattcaaccttcggcggtacttggttatacatctttctgctcacaagtccactggcttcaagctctctaagtgtttgaatcagcattttctgagttatatttgggataatgcgctttaattcactcgttctcttcggtccattcattaaaaagtataatacaaggcctttccattttccgccaatcacttcctttgtcacttcaaacccacagctaaattttttcatgtctaaagctctccattccacatttattactttttagttactatatcacaaaaaagtgggtacttccgataatgtgcttactgaaggatactattacttgtaagttgttcttcaagtacttaaaggtactagacataaaataatattaattctaaaggagtgttaagtatgggtgaatttgaaggtaaagtagcgcttgtaacgggtggaacaagtgggattggtcttgctgcagcacaaaaatttgtaaacgaaggtgcatatgtttatatcacgggacgtagacaaaacgaacttgataaagctgttaaccaaattggcaagaacgtaaccggtgttcaaggtgatatttctaagcttgaagacttagacaaactatatgacatgataaagcaggaaaaaggtaagttggacatcctttttgctaatgcaggcatcggcagctttcttccattaggtgaaattactgaagagcaggttgatagaacgttcggcattaacgtgaaaggaaccatttttactgttcaaaaagcgttatcactattcccggacaaagtaggttctattattgtaacgggctccaccgctggatcaattggcaacccagcatttagtgtatatggagcatctaaagcagcattaagagcactggttcgcaactggattcttgacctaaaaggtactgaaatccgtgtaaatgtggtaagtccaggagtgattcttacacctgcatacgatgagctttttggtgatgcacttgaaggagcgatggaaaatgccagaaatactgttccagctggaaaagttgggacacctgaagaagtagctaacgctgtatctttccttgcttcagacgaaagcagttacttgacgggtattgaattgttcgtagatggcgggctagcacaggtataatttcactgcgcagaggttacaaatcttccccaaaaaaggttaatggggatttacttgaagaagccgtataaaaaagtcgttttccttaaaggacagggaattcgacttttttatgtttgaatttgattaacgttgtaaattcgcattttcctggggctgccactaaatgacctgtaaaaaagattactttgtgaataaatgtacttaaagtaacggaaaggagaatgtccagttgttatttggagtgaattcggtggctataaagaacttaattctgcccattttataaagttcttttatgaaagacttcatgaaatgaaagaaaatcgggaagaagatgaagactaagacgattaataaaagaaagctctcttttagagagcttttttcagattttcaatttttaacaggctttataatgagcaaacaggcattactcaaaatactcgccgcgcctatccaaagcagccattgtgttgcggtcagccatgaggcagttaggataaagagtccaatggcaattgatatataattgccggctcggtccagtttacgattgcaatgaagtttatatttagcatgagaaataaattgatcaattttatctttcagctcatagcatttttccttcatcttatcctcagtttcttttacttttcgataaagcatattattcatcgtttgcactcccatatcgccgttttgaaaattcagccatgattttttcttcatagtcatctgagatggattgtgcctggtcttcaactttcaaatgtgctttttcttcaaaaccgtcctgttcttcaccatcaaaacgataaagtttttgcaatagcctccagaatgtttcaacttcttcagttgtgaactcatgaaacatatccgctaaaaaataggtggatctttctgaacaggaaattaacgctttttttccttcaggggtaatctcaatattgattgcacgtttatccagtttgcttggcacagtgtgaacatatccttttttcgagagacttgaaattaatttgttagcggtttgttttgttgtgcccagctttttagcgatattcataagtgtggtatcttccgtcggtaaatgggcaatagcaataagagtcatgtgctgtcgggaagtcaacatttctaagtattcgtccccccgagtctgcaccttattgacaaccgaaaataatgatgcgtaactttgttgcataaaatgcagttccttcattagtaatttaatatccataagttatctcccatctaaattgtcaccatgttgacaattacaatatacatcacgaagggaaataagtcaacatggtgactaatagggcgggtacggctgttttcaaaaatgccacagacagtcggagtgtttacaaaaggggaaataagtataataaatgcgaaaagggcattaatccaaagtgggaaggtgtttgacattcagaaagtgaactggtcagaacggtatgaatggttcaataaacaagatgaaaaagatgggcgtttaatggcgttccttcgtcatgagcttacatatgaggaagtcatacggttatataagaaagggttttatttgaaatcaaaagaaggggatgtttcgttacgtaagaacgatatctgtcgtatgtttggggttgaagagaggcagtggggcaaatcttaatgaacgggaagagaaaaactcttcccgcttttcatagcagctgttattctttttccagcatggaagtcagccattctcttaatgccggtttctgcacataccgctttccgtttctcgtgatatgcggaatgtcagatattcatgaggatcaggtgagttaaagttttcaatccgtctccgatgaaatatccggctaaagcgattccaatgccggtaatatatccaaacctccaataaacgttatcattttttatacggtgaagccggccggaggattcagccttcagcaaaaccgccgggcgtttattgcggacggttttgattgctgagcttttccacctgcacctttccggagaagaaaacagcacctccgcccatatccgccagccgatcgggcgtgagtgaattgacgagctgttttttatcatccatatcggcccaaagaccttggctcaccgcaacgccgggaagcacctgttcgccgaccgaaacagtcaattcgcactctccgcggtgattccaaactctaacggtttctccgtcttctatgttccggtgtacagcctcttctgtatgaataaaaagttttggcgctttttccagttttacgtgtttttcgttatttgaaaatgtcgaatttaaaaaattatgattcggtcccgggacaaataaaagcggaaaatcgtcatcgctctcaagagggatgtgtgtcggcagcgccggataaccgtcctgtttcatcttttccgaatataattcaattcttccgctcggtgtcttgagctttcccggaaaaagcggttttttccgtttggctttcatgaaggaatggcttgagagcgcttcgtaatcaatatcctcgatatacggattgtcgggaaagtccagcgcctgtctgattaattcttcatcagaatcctgaagctcctgctcggtaaatcccattgctccggcaagcagacggaacacttccgtattcgatttgctgtctccgtagggttcgatcaccggtttttgcagctgaataaaatgatgccagtaagacgtgtaaaaatccgtgttttcaaaagcggatgaagcagggagcacgatatccgcatatttggcggtttccgttaaaaacagatcgtgaacgactgtaaataaatcctcccgcagcaggccttttctgactttattcgcttccggcgcaaccactgcgggattcgtaccgtaaataaacagggagcgcacgggcggttttgtttctaaaagaacgcttccgagcctgttcatattaaatgatcgcggcttccggccgtaaagcagatcaggccgctggagcgcttgtctgttatagtttaataccgcgctgttgtgcttgattgcgcctcctccggtgttgagccactgtcctgtaacagccggaaggcaggcgacggtgcggacgatcattccgccattgtcatggtgctgaatgccgtttccgatcctgataagggaaggggaggtttccccgtacattctcgcaaggcgtctgatatcgtcggctttaacgcctgtaatagcagaaaccgtttccggatcatagtgtttgacatgcgcttttaattcgtcactgccttcggtgtattctgtgagaaatgcttcatcgtgaaggttctcagcgaataagacatgcatgataccgagggcgagtgcggcatctgtgccgggacgaatgggaataaaccaatcagcaagccggccggtttggttcttatgtacatcaataacgacaatcttagccccttttttccgggctttttgagcaatcatgacttggtgcatattcgtgctgacggcattgattccccaaaaaataaagagcttagcatgtatggtctcctccggatcagtacccgctccttctcccattgtatagttatagccttcagaaccggctttgctgcagatcgtccgttcgagatgactcgctccgagacgatggaaaaaacggcggtccattccctctgccgccagttttcccatattgccgtaaaagctgtacggaagaatgctttccgctccttcttcggcaataagctctttccagcgcgaactgatcgtattgattgcttcctcccaggaaataggcgcaaacgcggcttcaccttttttaccgatcctttttaacggaacggttacgcgcttctcatcataaatacgctcagccatgtgtctgactttgttgcaaatattccctgatgtgaccgggtgatcggggtctccctgaatgttaacgatttttccgtctttttttgtcacaagcaagccgcattgatcgggacagtctagtgagcacaccgacttaaagaccccgttcggctgtgttgcagcagaattcatagcccatttctcctctttgtttatattgtaagcattataacatttcaaaatcgaacgtcaattcagaaaaaagtgttgacattacggaaagacttttctatgatgagtttattcttttaaacagcctgacaatttcatcattttattttctatccagagaggtggagggactggccctatgaatcctcggcaacatttattgtgccaattccagcaagcgtatgcttgaaagataggaaagaatggtctatacatatttgtgcgcttcaagcgtataaagacggtatatgaatctctttccttctttgaggaaagagatttttttatgaaaaaatttatgtgaaaaggatgttttgcaccatgacggttttaattaccgcgccatatcacgacgaggggctgaaggagctggctgagctgttcggccggactgtgcaccggccgtggaagaagcacggccgggcctatcgggaagatgaattgatccggatgattcaagagacaaacgcgtcggggcttataaccgaacttgatgaggtgtctcagcgtgttattgacatattgccggattccgcttttatcggtgtctgcagaggaatgccgtctaatgtggatattgcggcggcgactaaaagaaaaatccccgttttctttacaccggcccgcaatgcccaggccgttgctgaaatgtttatcgggaatgtgatttcatttttgcgtcatacgtattcttcccatcagtggctgaaggacggaaagtggaatggtgattatttgcaggcttacgtcaaattcagaggaaatgagctgacggggaaaacagtcggccttatcggtttcggagctgtcggacagagaatcgccaggctattggccgcttttgactgcaaggtgctttactatgatccatttgtccgtcatgaaaaccgggagtatgaaaaaacgacgattgaacgggtattttctgaaagtgatattgtttccgttcacttgccgcgcacagaagaaaccatcggccttatcggcgcccggcactttcaattgatgaaacaggaagctgtttttgtcaatacgtcaagagcggcggttacagacagggaagagctgctgcgggtgctgaaagaacggcggattaagggagcgatccttgacgtgttttatcacgaaccgcctgaatcttctgattatgatttgatctctttgccgaatgtgttcgcgactccccatttagcgggcgcaacatttgaagtggaagatcatcatgtgaagattttaaatgaagcgcttttcaaatggaaacaagatcaaacctattcaatacgtgaactttataacaaaagagaacttgaaacggaaggaggaggctgtaatggctgaacaaaaaggctaccttgtatttgacatcgggactgggaatgcgcgagtcgcggtcgtgactgccggcggcgaagtgaccgcgcttgaaagggaagacattgaatatgtgacggatccgctttatccggacggacgatatttctcaccggaagggttatggacgcaaatcagcgctatggcaagaaaggctattgccaagagccctcatattacattaatcggaatcacctcaacaagccagaggcagggaatcgttttgatcaataaagataaaaaggcatttctcggtctgcccaacattgataacagagggcgtgaatgggaaggcggaattgaggcagaagaagtgcatcagcaaaccggacgtcttccgagcgctttattttccgccatgaaacttgtcggattaaaagccagacagccgtctttatggaaagaagtgaagtgcatcacaagcatcagtgactgggtgacatttgagctgagcggaattttaagctatgaaccgtcacaggctgctgaaacactgctgtttgacgtaaggaaaaaggcgtggtcagagaaattatgcaacatcttcggtgtgccttctgccattcttccttcactcgtccgatctgggacggttgtcggaatgttaacgtttaagaaagcggcggtgctcggtctttctgaaagagtgcctgtgattgcaggcgggggagacacacagcttgccatcaaaagtgcagatgcaaagccgggagatatcgtcattgtatccggcacgacgacgccgattacaaagataacagcggagaccggaaccgaaagtttagagaatgcatggctgaattgccatacagaagaaggtgaatggcttcttgaaacgaatccgggtgtaacaggactcaattatcaaaaattaaaatccattttttatccgaatgaatcctacagcgtcatggaacgggaaatcgcaagtctgccgaaacatgatcatgcctgtatatctgcgttaggctcctatttatctcctgagaaaaacgcactggcaaaaggcggatttatttttgacgctccgctgtcccaaaacttaagcagagcccattttgtcaaagctgcactgctggaaatcgctttttcaatcaaatggaactatgaggcgttaacagaggcggcttccttttcacaagattatgtgaaggtgtgcggcggcggtttccaaagtgatgctttgacgcagtttcttgctaaccttcttcaaaagaaaatctataagagagaggggttcagccaggcatccgcaatgggagcggtgatgatttgcaacgaagctctcggtgtgaaagcagagctttcgacctgcacaaaggtaattgagccggaagcggatcagacggatctcttcctatatgaagaatggaaacatacccaaaaattatttactcattttcagccggcggtgaaagcctgacttggggatgagatgacaacatgaaagattgctgaggaggaacaaaaatgcttaataaaataggaattccgaaacagctcgcctggggatttttaggggtcgtgctgtttatgatgggggacggccttgaacaaggctggctcagcccgtttttagtcgaaaacggcttgacggtacagcaatcagcatccttgtttacggtttacggtatttctcttgctgtggcgtcgtggttttcaggagtctgcctcgaagccttcggcgcaaagcggacgatgtttatggggctgttgttttacgtcatcggaacagccgcgtttatcgcatacggatttgagaatcttaatttgccggtgatgtatgtcacgtattttattaaagggctgggttacccgctgtttgcctattcatttttgacatgggtgatttaccggtcgccgaaaaacaggctcagtacggcggtcggctggttctggattgcatattgctgcgggatgtttgtattcggtgcttggtattcaagctgggccatcaaatccttcggctatttgaatacgctgtggagttcaattttctgggtatgtctcggcgcgttttttgctttgattttaaatagggaccgctttgaaaagaaaaaggcagataagcgggaaaaggcgcaggaattaatgaagggaatcaccatccttgctgaaaatccgcgcgtgctctctggggggatcattcgaatcattaacagcatcggaacatacggatttccggtattcctcccgatgcatatggcgcagcacggcatttctacaaatgtatggctgcaaatttggggaacgatttttctcggaaatatcgtctttaacttaatcttcggcgcagtcggcgatgccttcggctggaaaaagactgtcatgtggttcggaggagtgggctgcggcatttttactcttttattatattatgctcctgttgtatcacatgggaatttgctgttcgtcagcattgtcggttttatatggggagggctcctcgccgggttcgttccgatcggggctatcgtgccgacggcggccggcagcaataaaggtgctgctatgtctgtgttaaatctggctgcgggcctgtcggcatttgtcggccccgcgcttgcctgggcgttcatcgggcttgtcggcgcacaaggcgttgtatggattttcgcagcgctctatttcgtaagtgcgatcttgacaaatcaaatcaaaatacctgaagagaaaacggcaaaacacaataaagcattgcctgaatacgcttcttaacagcagcgccccgaaaattcggggcgtttttttacggctgatgaagaaacccggcaaaccgctgaatttgttcacgtaacgattgtttgttttcgtgaaattgtttgaaacgatgtccgtttgctccggacggatgcgggaagccttccagaatgaccgcatggcccattctgcggttcttcttcagcgtgcggcaggctgattctgctgcttttccgagagggataagcagaatgtcttttttcatcatttctatttcatccggaaaacatgtcagcgcgtaacggctgagaagagctgatctgctgatggccggccggtgtcccgtatagtttttctgtttataaaaaacagggtgtttgataacggatgtcgtatgaagcagctccctttttgaatcaaaaaaccgggatgaatcctcaacgtgaagcgcggccggcagaccgcattcattaagcatttcgatgatgtgctgcctcatggaaccggaaagtccggccgctttttttgtctcatatgctatcacctcaagagattcgccgttttttaaaagctgtgccgctgctttgtacgcccgctgcatctgaaaaaaaccgggtgtaattccggagatgacaaccgcagcatgtgggttgatatactcattatgaggcgaataatacatatccagatctccgtccttggctaaatggaactccgaagtcagcaaatccgattttgtaaatcctcccgaagatgataatgctttaagctgctgcaaaaaatgcgcaagccgctcacgatcgcaaatcatgttatgcctccttgaatccgccagtttctcttagtgtcatcaaaaacgtcggatgacatgcaggctcataaaccgcttttaccggcgttccagagcattttcaggacgtgaggcgttcctttaacttcggctgccgtcgtttgcacggctgtttttttagtaagaaagtcttcctgcagttctttctgcttttgtgataacaaacgggtttctgttttgatttcttcaacggacgtctgcatggacgctgtcacggcgttaatcttctttatatcaggcgctgtgtttcttttaaaatgcacggcggatacggctgcataaattaaagcggcagccgcaacggcagcactgatatacaaaatgatgatcatctgcttttcactcctttttttcagttgataccctttacggatcgtgctgaatcattttatttgctaattgttttttttctgcttataatgtgaaatcgtacataaggacattcagaaagggtgaaagacatggaaagcttacaaaacaaaacggctcttatcacgggtgcgggcagaggaatcggccgcgccgccgctatcgctttagccaaagaaggagtcaatatcggtttaatcggccgtacagaagcaaatgtcgaaaaggttgcggaagaagtgaaagcccttggtgtaaaggcatcattcgctgctgccgatgtaaaaaaccaaaaagaggttgaacaagccgtctcttctattaaagaagaactcggtgaggttgacatcctgattaacaatgccggaatcagcaaattcggcggatttttggatcttacgcctcaagagtgggaagacatcattcaagttaatgtaatgggtgtataccacgtgacacgcgccgttcttcctgaaatgattgagagaaaatcaggagatatcattaatatttcttctacggcgggccaaagaggcgccgcggcgacaagtgcgtacagcgcttctaaatttgccgttctcggtctgaccgaatctctcatgcaggaagtcagaaaacacaatatccgtgtcagcgcaatgactccgagcacggttgcaagcgacatgtctattgaattaaatctgacagacggcaatccggaaaaagtcatgcagcctgaggatcttgcagaatatatggttgctcaattgaaattacacccgcgcattttcatcaaaactgccggtttgtggtcaactaatccttaatcaaaaggggacctgtctttgtgacgggtcttttttgttttcgcaacccgattaaataggcataaagatccgtttttgcagaaaaaagagtgaaaaagaaaccgatatcagctataattaaactaaataaactatgtaccaaatgttcaataagattatttttccccgcatccaaaaaacaaatcaatataaaccaaactgtccgaacaataaaagggaaaacgggatataaagagaatatttagtacatggaataatttgttagaaggaagggtgggcacatattgaaagaagaaaaaagaagttcaaccggttttttagtaaaacaaagagcctttttaaagctttacatgattacaatgacagagcaggaacggctttacggactgaagcttctcgaggtgctgcgttcggaatttaaacccatcggttttaagccgaatcataccgaggtgtaccgttcacttcacgaacttttggatgacgggattttaaagcaagtaaaagtgaaaaaagagggagccaaactccaggaagtcgttctctatcaatttaaagactatgaagctgcaaagctttacaaaaaacagctgaagacagagcttgaccgctgcaaaaagctgatagaaaaagccatttcagataatttttaaatccggccggaacgctcccggcctcccgggctcaaaaggtttgttctgtgattcattatacataataacaggctcggaacaatacatatcaataaaacctccaaacttgacatcgactcctgaagtggtaacataaaaaacgtgtgaaaaatacgaacaaaatacgaacaagggagatgttaccgatcttagatcaaaagaaagttgcttttatcggagcaggatcaatggctgaaggaatgatatcaggcatggtccgcgcaaaaaaaattcccaaccaaaacatctgcgtgacaaaccgccgcaatacagagcgactcgctgaattggaacatcaatacggaattcaaggcattgcttttgacagcatgaaaaccgaagacattgatgtctttattttagccatgaaaccgaaggatgctgaaatcgctcttgctacgctgaaacggcgtattcaacctcatcaaatcatcctgtctgttctggcaggcataacaacctcatttatacaacaatcattacatgaccgtcagccagttgtaagagtgatgccgaacacatccagcatgatcggcgaatcggcaacagctgcggctttcggagaccatgtctcttacggttcagcaaaaaccgcggtatctcttttggaatgcctcggggaagtgtacgtgatcaaggaagatcagatggacattttcaccggcatcgcaggcagcggaccggcgtacttttattatttaatggagtttattgaaaaagcaggtgaagaagccggcttagacaaacggctgtcccgcaaaatcggggcgcaaacgttattgggcgctgcaaaaatgctgatggaaacgggtgaaaaaccggatgtgcttcgggaaaacatcacctctccaaacggcacgacggaagccggcctcgatgcgctcaggtcagaaggcggcggagaagccattgccaaagccattaaacacgcgaccgaacgttctattgagatcagcaaaacaattgaaaaaacggcagcactataatcgttaaaaaacaggagtgatacagtgacgtctcggacgaagatcaaaagagtcgcggtgaaaatcggaagcagctcactgacgagcctgcacggggaaatcagcagaagaaagctggaagcattggtggatcaaatcgcacagctgaaggacagcggctatgaagtgattttaatatcttccggcgcagtggcggcaggttatcggaagctcggatttattcagaaaccggaaggcctccctgaaaaacaggcttctgcttccatcgggcagggattattaatggaggcttactcaaagctgtttttagcgcacggttatgtcgcatcacaaatattaattacaagaagcgatttttccgatgaataccgctaccataatgtgcgcaatacgatgaacgtccttttggaacggggcattattccgattattaatgaaaatgacacggtcacagtcaaccggctgaaattcggagataacgatacacttgcagcgaaggtggcaggtttaattgatgccgacatgcttgtaattttatcagacattgacggtttatatgatgataatccgcgcagcaacccgaaagcgaaaagaatcagacatgtaagtgacatcactccggaaatagaagcaagcgcgggagatgccgggagtgaaatgggaaccggcggaatgcgttcgaaactggatgcttttaagattgtgatggcctccggtattaaaggctttctcgggcaggctaacattccggacattctgcttcaagcggtagatgaggcggctgaaggaacttattttgaagcggaaggaaccctgccgttaaaccacaaagaacaatggcttgcatttaattccggccccgaaggcgaaattgtgatggaaaagaaaagcagccgcgatgtcgcaaacggaaatatggcgctgtcaccgcaggatatcgaacagattaagggcagattcagcagcggagcggttgtcaggctgcttgatcagcagggagaagagctcggactcggcatcgtcaactattcctcagcccagctgaagacatttaaagaaacgcctcacaaacagaccgatcaatcagtcattgatccggaagcgtttgtctgccacgttgaactatccattccgatcggctgagaaagatctataaaaatatgaaaaagcccgaggcttcgttttgaagctcgggtttgttttttattgatattgttcaagtttggagaaaaattgaatgacaaaatgatagaaatcatttgcagacggagccagttctcttccttttggtttaataatgcctacggtccgcttcacttgaggaaattcaatcggaattttgaccgtgaaccggggtgtggtttctgcaaaggtgctttcaggcaataaagtaactcccatccccgcggagactaatcctttaatggcatctaaatcctcgccttccgtcgatacaagcggcgcaaagccggcctgtctgcaagcgtcaatcgccatgtttcggagaataaacccttcaggaaataaaacgaattggtccccgcgcagatcaattaaatgaatatttttctgtttggcaagcggatgatgcagcggaacaagcgcgtaaatcttttccgtgaataagatattgcctgttatgtcggggaattccgtcggaacggggccgagcagcgcagcatctatatccctgtttcttaccgcttcgattaaaaacttataagaaccctggcggagcaaaaactcaacgttcgggtattcctctttaaatgccgaaatcacagtcggcaaaagctggcttgcaaggctcgtcggaaatcctattttgacggttccgcgattcggatcaagatattcatcaatttgttccttcgcataatcaattgctttcatcgccgttttaacatgttctaaaaattgtttgccgatcggcgttaatttaatatttctgccttcccgttcaaataaagtgactttcagctcttcttcaagatttgcaatctgccggctgatggcggattgtgcgacatgcagatgatcagccgcttctgacacatgttcccgttctgctacctccataaaataccgaagctggcgtaattccattgcgttcacacccatctatctcattttgagatgtatttgatctaaattatatattgtttatattgttttgaaaacttacaattaatttaaagttgtcagattttatgaccgataattaacggaaactgatcgggggagaggaattatgacttacaatcaaatgccgaaagcacaaggtctctaccgtccggaatttgagcacgatgcatgcggaatcggcttgtatgcccatttaaaagggaaaccttcacatgacattgtcaaaaaaggactgaagatgctttgccagctggatcacagaggaggacagggcagtgatccgaatacgggtgacggcgccggcctgatggttcagatccctgatgctttttttaagaaagagtgcggagaaatgaagctgccggaaaaaggccgttacggggtaggaatggtctttttctcgcaaaatgaagaggaaagaaaaaagatcgaaaaacaggtgaatgcattcattgagcaggaaggacagatcgttctcggctggagaaccgtccctgtaaatgtcggaaaaatcggaacagtggcacaaagcacttgcccgtatgtgcgtcaagtatttatcggagccgcaaacgatttgaaagacagccttgcttttgaacgcaaattgtatgttatccggaagcaggctgaaaattggggcgttcaagaacagcttgatttttacttcgcaagcctgtcaagccagactattgtttataaagggttgttaacgcctgagcaggttgacgctttttatttggatttgcaggatgaaaccttcgtatctgcattttcactcgtgcattcaagattcagcacaaatacctttcctacttgggaacgtgcccatccgaaccgctatctgattcataacggagaaatcaatacgctccggggcaacatcaattggatgagagcgagggagcagcagttcgtttcagaaagcttcggagacgatcttcacaaagtgctgccgattttaaatgctgagggcagtgactcatccattcttgataatgcgtttgaatttttcgtgatggcggggcggaaaccggcacatacggcaatgatgctgattccggaaccatggacggaaaacactcacatgtctaaagcgaaacgggctttttatgaatatcacagctctttaatggagccgtgggacgggccgaccgccatttcgtttacggacggaaaacaaatcggcgccatccttgaccgtaacggcctgcgtccggcacgttactatgtgacaaaagatgaccatattattttctcatctgaggtcggcgttattgaagtggagcagaagaacattcttcataaaaaacgtctggagcccggaaaaatgctgctcattgacttagaggaaggccggattatttcagatgaagaagtaaaaacagaaatcgccaatgaattcccgtatcaaaaatggcttgaagaagaattggttcaagtgaatcctgacccggaaatccgggaagaggaacaattcgatgatcttctcgtccgtcaaaaagcgtttggctatacgtatgaagatatccagaaatatttaattcctgttattaaagaaggcaaggacccgctcggctctatgggaaatgattcgccgctcgccgttttatccgatcgcgcccaatcactgtttcattactttaaacagctgtttgcgcaagtcacaaacccgccgattgacgcgatccgcgagcagcttgtgacctctacggtgacatggcttggggctgaaggtgatctgctgcatccgagtgaaagaaatgcacgccgcataaaattgtatactcctgtattatcaaacgaacagttttatgcgctgaaaacacttgtgcaccctgatattaagagccagaacatccgcacgctgttttccgatgacctggaaaaaggcctgaaggatttgtttcagcaagcggaaaaagcgatcaaggaaggcgtatctctgttaattttatctgacagggcaatgagtaaggaattgacgccgattccgccgcttttggccgtcagtgcgctgcatcagcatttgatccgtcaaggcctgcgaacaaaagcaagcattatcgttgaatccggggaagcgcgtgaagttcatcactttgcggctctcatcgggtatggtgccgatgctgtcaatccgtatttgacttatgctacgtataagcaggaaatcgatgaaggccggcttgatattccgtatgaagaagctgtcagcaaatacggaaagagcgtaacagaaggcgtcgtgaaagtgatgtcaaaaatggggatttcaactgtgcaaagttacaggggcgcccaaatttttgaagcggtcggcatcggtgaagacgttatcgccaaatactttaccggtactgcatctcagcttggcggaatcgatatcgagacgattgcgcaagaagcgaaacagcgccatcaagcggcgtacaaggatgattacagccaaactcttgatcctggaagtgaattccaatggcggaacgggggagagcaccacgctttcaacccgaaaaccatccatacgctgcaatgggcctgccgaaaaaatgattacagcttgtttaagcagtattctcatgcagcggatgaagaacgaatcggatttttacgcaatctgttcgccttcaaagaagaccgcaagcctttaaaattagaggaagttgaatcagctgcgtccatcgtgaaacgttttaaaacaggagcgatgtcattcggttcattaagcaaggaagcccatgaggctttagcgatagcgatgaacaggcttggcggaaaaagcaacagcggagaaggcggcgaggacccgaaacgtttcgttccggatgaaaatggcgacgacagaagaagtgcgattaaacagatcgcctccggccgtttcggcgtaaagagccattatctcgtcaatgcggatgaattgcagatcaaaatggcgcaaggagcgaagccgggagaaggcggtcagcttccggggaacaaagtatatccttgggtcgcggatgtccgcggttctacaccaggtgtagggctgatctcaccgcctcctcaccatgatatttattcaattgaagatttggcgcagctgatccatgatttgaaaaatgcaaatcgaagcgcgcgaatcagcgtcaagctcgtgtcaaaagccggtgtcggcacgattgcggccggtgtggcaaaaggcactgcggatgtcatcgtcatcagcggctacgatggcggaacgggcgcatcgccgaaaacgagtattaaacataccggtcttccgtgggagcttggtcttgcagaagctcaccaaacgctgatgctgaacggtttacgggatcgcgtggtattggaaacggacggtaagctgatgacaggccgagatgtcgtgatggccgccttgctcggtgcggaggaattcggctttgctacagcgccgcttgtcgttcttggctgcatcatgatgcgcgcctgccatttagatacatgtcctgtaggtgtcgcgacgcaaaatccggagctccgcaaaaaattcatgggcaatcctgaccatatcgtaaattacatgctgtttgtcgcagaagaagtgcgtgaatatatggcgcagttaggctttaagacgcttgatgaaatgatcggacggacagacgttcttcatgtcagtgaacgtgcgaaagcgcattggaaagcgggccagcttgatttatccacactgctgtaccagcctgaaggcatacgcactttccgtacggcgcaaaaccataaaatcgacgagtcgcttgatatgacggttattcttccggcggtgcaggctgcaattgaagccggtcaggaagcggaagctgaaatcaagatcaataatacaaaccgcgtagccggaaccgtgacgggaagtgaaatttctaaacgctacggagcggaaggcctgccggatgatacgatcagacttcattttaccggatcagccggacagagtttcggtgcatttgtccctaaagggatgacgcttcatttgaacggggattcaaatgactacgtaggcaaagggctttcaggcggaaaaatcatcgtgaaagcgcctgatgccttcaattatgaaacacacgataacgttattatcgggaacgtcgcattttacggagcaacaagcggggaagcgtacattaacgggcgcgccggtgaacgttttgcagtccgtaacagcggagtcaatgtcgttgtagaaggtatcggagaccacggctgcgaatacatgacaggcggccgggttgtcgtcctcggcgaagtcggcaaaaacttcggggcgggaatgtcaggcggtatcgcatacgtcctgagtgaagatgccaaagcatttaaacgcaaatgcaacatggaaatgatttcatttgaaaagctgacggatgaggcggagatcaaagaagtgcaagaaatggtcaaacggcatgcggcgctgacaaacagcaaaaaagccgcaaatctcctggacaattgggaaaaagccgcagaaacctttatcaaagtcattccgaaaaactataaacaaatgctcctcagcatcgaagaacaaaaagcggcgggtttatcagaagaagacgcaattatgtatgcttttgaagccaatacaaaggttcagcaaacgcctgccaaagatcaaaaacaagcggtagtacagtaagaaaggggagaggaacatggggaaaccaactggattcatggaagaaaaacgagaaaaaccggctgagcgggaccctctcactcgcttaaaggattggaaagagtattcggctccattttcagatgaagcgtcaaagcggcagggggcgcggtgtatggattgcggcacaccgttttgccaaatcggcgctgatatcaacggttttacctccggatgcccgatttataatctgataccggagtggaatgacctcgtctatcgggggcgctggaaagaagccttggagcgccttctgaaaacgaataactttcctgaattcacagggcgggtctgtcccgctccttgtgaaggatcttgtacgctggccatttcagatccggctgtttcaattaaaaacatcgagcggacgatcattgacaaaggttttgaaaatggatggattcagccgagaattcccgcgaaacgcacaggtaaaaaagtcgctgtcgtcggttcaggcccggcaggtctggcaagcgctgatcagctgaatcaagccggtcattccgtaacggtctacgagcgtgccgacagagccggcggcctgctgatgtacggcattccgagcatgaagcttgagaaaaatgtcgtcgaacgccgtattaagcttttgacgcaggaaggtatagattttgtgacaaataccgaaatcggcgttgatataacggcagatgagctgaaagaacaatttgatgccgtcattttgtgcacaggcgcccaaaagcagcgcaatctgctgattgaaggccgggaagcaaaaggcgtccattatgcgatggactatttaacactggcgacgaaaagctatttagattccaacttcaaagacaaacaatttatagacgctaaagggaaagatgtcatcgtgatcggcggaggagacacaggagctgactgcgtggcaaccgcgctgcgtcaaaaagcgcgcagcgtgcaccagttcgggaaacatcctaaacttcctcagacgcgcacgaacgacaatatgtggcctgaacagccgcacgtctttacccttgaatacgcctatgaagaagcgcaggcaaagttcggcaaagacccgagagaatattcaattcaaacgacaaaaatggtggccgataagcagggccgcttacaagagatccacaccattcaaatggaaaaagtcagaaacgaattcggaaagtatgaatttcatgaactgcccggtacagaaaaagtctggcctgctcagctggtgttcatcgccatcggttttgaagggacagaacagccattattgaaacagttcggagtcgattcggcaaatcataaaattcaggcggcatatggggattataaaacgaatgttgacggtgttttcgccgcaggggatgcgagaaggggccaaagcctgattgtatgggcgattaatgaaggccgggaagcagcgcgcgaagtcgacagttatttaatggggagcactgttttaccgtaaataaaggggtttatttataaaaccggctgggatcagccggtttttcgtattgaaatggaacctccttcttcttgtattggtcatataaaggtaatgtggaaatggaggataaatatggaattttgttttacagagcggagagattgtttttttccgcagactgatacgatttgcaagccttgcgcaatcgatcagggtgctgctgacggcggaagtcatcgctgccgtttaaaatgacgccttaaaaaacatgacgggctctgtgtgtctgcagtcgatttgcgggcagattttaatcgatgaagaaaaacatattgaatttcaagcggaaacgcttaaaaacaaataagggaacggacgggtccgttcctttttttagacatctatacgaaagccgatattgccgaactgccgtccttcccgcattctgttaaaagcgggagctgcttcactgagagggtacatgcggtcgataatgggacggagctcgcagcggtttatcaattccagcatatccgcgaattcctcattgcttcccattgatgtaccgagaatatgaatctgcggaaaaaacagcgagcgaatgggaaatccgagctgatcgcctgaactggcgccgaatgttacgatccggccattcggtttaataatgtcaagatagtgttgatataaagcggggcctacaccgtcaagtatgatatctgctttttcgccattcagcgcctcattccagtcaccgtagctgtcaatcgcccggtctgcaccgtatgacagtgcggtttgttttttgttttcactgcgggaggtgacgctgactgtcgctccgatagcttttgccattaataaggcatatgttgccacgccgcttccgatgcccggaaggataaggtgttcgcctttttttaattgtccttttgtaaataaggcgcgataagcggttaatgctgataacggcaggacgcccgcttcctcccaagtcaggtgttcgggttttaaaacggcattttccgcaggaacgatgacataaggtgaaaatgttccgtcgctcggaccgcctaaaatatcagggacggctggtacgtcctcaacagtcttccaattcagtaccgggttgatgatgacttctgcattcagtaaatgagaccggacgccgtgtcctatttcggttacgattcccgcgccgtctgaaccgagaataaattcatggtttccggtttcgtgttttttcattaaaaacaaatcacgatggtttaatccggctgttttcagctttatttttacttcgccgtttcccggccttttgtcaggtgcctgcctgaaattaaagccattttcgtgtatgataaggacattcatgattcttctctcctttatgattgatgagaaaaattttacaggctgtatcagctgcagtaaataaatgaaaattgatagccggctatcaataaaaatcatagcaagaaggtgcccttagatggaaagcggagacttaaagatttttcaggctgtcgcccgcaaaggaagtatttcaaaggcggcagaaagcctgcattatgttcaatcaaatgtgacaaaccggattcagcagctggaacggcaattgcaaacacagcttttttaccgcacaaatcggggaatgacgctgacgccaacaggtgaaaacttattaaaagacgcagacagaatccttcaattgctgcatgaggcgcaaaaaacagcgcgagaggcaggcgatccgaacggcccgcttcgaatcggttctcttgaaacggcggcagccgtccatctccctcaatttttcacggagtattgcagccgctacccgaaagtacagctgtctctgtcaaccggtgatacacataccttagtgcagcgcgttctacactatgagctggacggcgcttttgtttacggaccggtcgaatatgaagatcttgagcaagtcgctgtatttcaagaagaattggtcttggtttcaaataagcgggaaggcagtttgcaagacttgctgcgagagccgattctgtattttgccgcgggctgttcgcaccgccgcaaaataaaaaacatactgaaagaagaggcagtgcccgcacataaaatcattgaattcggtacgttggaagccattattggggcggtgcaggcggggatgggggtctcctttctgcctgcatcagccgtccgttattttcaaaacaggaaaaatctttttcttcatgagcttcctgaacattttcggaatatgaatatatcattcatctaccggagtgatttatttttaacatcggcgtttgaagaactgctgaatggattaaaaacattatcgaacagaagatgagaaaacaggacagctgtgtacgccaattttttttcgttccggtttttctcaaaaagaaagcgggtatccgggctgagctcgatcagcgtgatgaaaaactcggctataaaatcagagaagcacaaatgaaaaaaataccgtatatggcggttgtgggagatcaagagtgccgccaccattctgtacatgtaaggcaatacgggcgggaaaacacatttgaagagaatgtgagtgattttatttcccggatcataagagagacaaaacaaaaaatagagattcaagaaaaataacattgacatatcgcaaaatcacgatataataaagcgtatgaaacctattgatgtttttaaagcgttgtctaatgagtcacggcttgagattttacaatggctgaaagagccggaccgtcacttcgcaccgcatgatggcattgatatgaatgagatcggagtatgtgtcagccagatcaccgataagcttcagatgacacagtcaacggcgtctcaatatctttccattcttcagcgcgcaggccttatccaaacaaaacggattggcaaatacacctattataaaagagatgaagatgcgataaaggcgatggccgattattttcagcgcgaaatgtagggctgaatcctttagaagagggattcagtttcttttttcgactacacatcgacatattgcgatttgtttctgtttgttcaattctttatatcgatatatcacaatatatctttatataaattatcaatgaaggagtgtgtcaggtgcaaaatacctggaagatttacattttggcaattatcagctttttagtggggacgtctgaatatgtgatatccgggatgcttgataaaattgcaggttccttgggagttactgtggcagcagcagggcagctgattacgatt
